(19) United States
(12) Patent Application Publication
(10) Pub. No.: US 2022/0349010 A1
(43) Pub. Date: Nov. 3, 2022

(54) METHOD OF PREPARING SUBJECT-SPECIFIC IMMUNOGENIC COMPOSITIONS BASED ON A NEO OPEN-READING-FRAME PEPTIDE DATABASE

(71) Applicant: Frame Pharmaceuticals B.V., Amsterdam (NL)

(72) Inventor: Ronald Hans Anton PLASTERK, Amsterdam (NL)

(21) Appl. No.: 17/261,997

(22) PCT Filed: Jul. 25, 2019
(86) PCT No.: PCT/NL2019/050489

§ 371 Date: Jan. 21, 2021

(30) Foreign Application Priority Data
Jul. 26, 2018 (NL) 2021400
Jan. 24, 2019 (NL) 2022447

(51) Int. Cl. C12Q 1/6886; A61K 39/00

(52) U.S. Cl. CPC C12Q 1/6886; A61K 39/001151

(57) ABSTRACT

The present invention relates generally to the identification of tumor specific neo open-reading-frame peptides (NOPs) and the uses of these NOPs to produce cancer vaccines and the like. More in particular the invention relates to identifying at least one neoantigen in a patient and based thereupon preparing a subject-specific immunogenic composition. With the present invention it becomes possible to provide off-the-shelf cancer vaccines and the like within a short period of time and for potentially 30% of the total population of patients suffering from cancer.

### FIELD OF THE INVENTION

[0001] The present invention relates generally to the identification of tumor specific neo open-reading-frame peptides (NOPs) and the uses of these NOPs to produce cancer vaccines and the like. More in particular the invention relates to identifying at least one neoantigen in a patient and based thereupon preparing a subject-specific immunogenic composition. With the present invention it becomes possible to provide off-the-shelf personalized cancer vaccines and the like within a short period of time and for a substantial percentage, up to 30%, of the total population of patients suffering from cancer.

### BACKGROUND OF THE INVENTION

[0002] There are a number of different existing cancer therapies, including ablation techniques (e.g., surgical procedures and radiation) and chemical techniques (e.g., pharmaceutical agents, and antibodies), and various combinations of such techniques. Despite intensive research such therapies are still frequently associated with serious risk, adverse or toxic side effects, as well as varying efficacy.

[0003] There is a growing interest in cancer therapies that aim to target cancer cells with a patient's own immune system (cancer vaccines). Such therapies may indeed eliminate some of the herein-described disadvantages. Cancer vaccines or immunogenic compositions intended to treat an existing cancer by strengthening the body's natural defenses against the cancer and based on tumor-specific neoantigens indeed hold great promise as next-generation of personalized cancer immunotherapy. Evidence shows that such neoantigen-based vaccination can elicit T-cell responses and can cause tumor regression in patients.

[0004] Typically the immunogenic compositions/vaccines are composed of tumor antigens (antigenic peptides or nucleic acids encoding them) and may include immunostimulatory molecules like cytokines and that work together to induce antigen-specific cytotoxic T-cells that target and destroy tumor cells. Vaccines containing tumor-specific and patient-specific neoantigens requires sequencing of the patients' genome, as well as the production of personalized compositions comprising a combination of tumor-specific neoantigens present in that individual subject. Sequencing, identifying the specific neoantigens and preparing such personalized compositions may require a substantial amount of time, time which may unfortunately not be available to the patient, given that for some tumors the average survival time after diagnosis is around a year.

[0005] Accordingly, there is a need for improved methods and compositions for providing subject-specific immunogenic compositions/cancer vaccines.

[0006] In light of this, products, compositions, systems, methods and uses that provide for subject-specific immunogenic compositions/cancer vaccines and that would take away some of the herein-described disadvantages would be highly desirable, but are not yet readily available. In particular there is a clear need in the art for reliable, efficient and reproducible products, compositions, methods and uses that allow to identify and quickly supply subject-specific and cancer-specific neoantigens/tumor-specific mutant polypeptides. Accordingly, the technical problem underlying the present invention can be seen in the provision of such products, compositions, methods and uses for complying with any of the aforementioned needs.

[0007] The technical problem is solved by the embodiments characterized in the claims and herein below.

### SUMMARY OF THE INVENTION

[0008] It is an aim of the present invention to provide for methods for identifying at least one neoantigen for preparing a subject-specific immunogenic composition, the at least one neoantigen comprising a tumor-specific neoepitope, wherein the neoantigen is a tumor-specific mutant polypeptide or part thereof encoded as result of a tumor-specific frameshift mutation in genes of the subject having cancer.

[0009] It is a further objective of the present invention to identify at least one neoantigen (or DNA or RNA encoding such neoantigen) in a tumor sample of a patient suffering from a cancer.

[0010] It is a further objective of the present invention to provide for a method of preparing a subject-specific immunogenic composition based on the neoantigens identified in the cancer of the patient.

[0011] It is a further objective of the present invention to provide for a method of preparing a subject-specific immunogenic composition within a short period of time.

[0012] It is a further objective of the present invention to provide for the possibility of preparing off-the-shelf and subject-specific immunogenic composition within a short period of time and for a substantial part of the population of patients suffering from cancer.

[0013] It is a further objective to be able to provide off-the-shelf subject-specific immunogenic compositions for at least 5%, 7.5%, 20% or even 30% of the population of patients suffering from a cancer.

[0014] It is a further objective of the present invention to provide for a method of treating cancer in a patient, in particular wherein the patient is provided with a therapeutic amount of neoantigens as identified with the methods as disclosed herein.

[0015] It is a further objective to provide for a method of treating cancer in a patient wherein the patient is provided with therapeutic amount of a plurality of cancer neoantigen peptides in combination with an anti-CTLA agent, an anti-PD-1 agent, an anti-PD-L1 agent, other stimulants of the immune system or a combination thereof.

[0016] It is a further objective to provide for a computerized system for identifying such neoantigens for preparing a subject-specific immunogenic composition.

[0017] This and other objectives by the methods, uses, systems and compositions as defined throughout the description and as defined in the claims.

### BRIEF DESCRIPTION OF THE DRAWINGS

[0018] Embodiments of the invention are further described hereinafter with reference to the accompanying drawings, in which:

[0019] FIG. 1: Example of TP53. Panel A shows the amino acid sequence of the p53 peptide, and below it the pattern of SNVs encountered in the corresponding genome position in the p53 gene in the TCGA dataset, plus underneath the black bars that represent frame shift mutations in the same dataset.

[0020] Panel b shows for the −1 and +1 frame the pNOPs (as described and defined in the text), black bars are stop triplets), and the NOPs encountered in patients in the dataset, with every line representing a different tumor in a different patient.

[0021] FIG. 2: Schematic overview.

### REFERENCE TO A SEQUENCE LISTING

[0022] The Sequence listing, which is a part of the present disclosure, includes a text file comprising nucleotide and/or amino acid sequences of the present invention. The subject matter of the Sequence listing is incorporated herein by reference in its entirety. The information recorded in computer readable form is identical to the written sequence listing.

### DEFINITIONS

[0023] The section headings used herein are for organizational purposes only and are not to be construed as limiting the subject matter described.

[0024] A portion of this disclosure contains material that is subject to copyright protection (such as, but not limited to, diagrams, device photographs, or any other aspects of this submission for which copyright protection is or may be available in any jurisdiction.). The copyright owner has no objection to the facsimile reproduction by anyone of the patent document or patent disclosure, as it appears in the Patent Office patent file or records, but otherwise reserves all copyright rights whatsoever.

[0025] Various terms relating to the methods, compositions, uses and other aspects of the present invention are used throughout the specification and claims. Such terms are to be given their ordinary meaning in the art to which the invention pertains, unless otherwise indicated. Other specifically defined terms are to be construed in a manner consistent with the definition provided herein. Although any methods and materials similar or equivalent to those described herein can be used in the practice for testing of the present invention, the preferred materials and methods are described herein.

[0026] For purposes of the present invention, the following terms are defined below.

[0027] The singular form terms “A,” “an,” and “the” include plural referents unless the content clearly dictates otherwise. Thus, for example, reference to “a cell” includes a combination of two or more cells, and the like.

[0028] As used herein, the term “about,” when referring to a value or to an amount of mass, weight, time, volume, concentration or percentage is meant to encompass variations of in some embodiments ±20%, in some embodiments ±10%, in some embodiments ±5%, in some embodiments ±1%, in some embodiments ±0.5%, and in some embodiments ±0.1% from the specified amount, as such variations are appropriate to perform the disclosed method.

[0029] As used herein, ranges can be expressed as from “about” one particular value, and/or to “about” another particular value. It is also understood that there are a number of values disclosed herein, and that each value is also herein disclosed as “about” that particular value in addition to the value itself. For example, if the value “10” is disclosed, then “about 10” is also disclosed. It is also understood that each unit between two particular units are also disclosed. For example, if 10 and 15 are disclosed, then 11, 12, 13, and 14 are also disclosed.

[0030] The term “and/or” refers to a situation wherein one or more of the stated cases may occur, alone or in combination with at least one of the stated cases, up to with all of the stated cases.

[0031] As used herein, the term “at least” a particular value means that particular value or more. For example, “at least 2” is understood to be the same as “2 or more” i.e., 2, 3, 4, 5, 6, 7, 8, 9, 10, 11, 12, 13, 14, 15 . . . etc. As used herein, the term “at most” a particular value means that particular value or less. For example, “at most 5” is understood to be the same as “5 or less” i.e., 5, 4, 3 . . . −10, −11, etc.

[0032] The term “comprising” is construed as being inclusive and open ended, and not exclusive. Specifically, the term and variations thereof mean the specified features, steps or components are included. These terms are not to be interpreted to exclude the presence of other features, steps or components. It also encompasses the more limiting “to consist of”.

[0033] “Exemplary” means “serving as an example, instance, or illustration,” and should not be construed as excluding other configurations disclosed herein.

[0034] As used herein, administration or administering in the context of treatment or therapy of a subject is preferably in a “therapeutically effective amount”, this being sufficient to show benefit to the individual. The actual amount administered, and rate and time-course of administration, will depend on the nature and severity of the disease being treated. Prescription of treatment, e.g. decisions on dosage etc., is within the responsibility of general practitioners and other medical doctors, and typically takes account of the disorder to be treated, the condition of the individual patient, the site of delivery, the method of administration and other factors known to practitioners.

[0035] As used herein, “therapy” or “treatment” refers to treatment of a tumor with a therapeutic substance. A treatment may involve administration of more than one substance. A substance may be administered alone or in combination with other treatments, either simultaneously or sequentially dependent upon the condition to be treated. For example, the therapy may be a co-therapy involving administration of two agents, one or more of which may be intended to treat the tumor. The substances may be administered simultaneously, separately, or sequentially which may allow the agents to be present in the patient requiring treatment at the same time and thereby provide a combined therapeutic effect, which may be additive or synergistic. The therapy may be administered by one or more routes of administration, e.g. parenteral, intra-arterial injection or infusion, intravenous injection or infusion, intraperitoneal, intratumoral or oral. The therapy may be administered according to a treatment regime. The treatment regime may be a pre-determined timetable, plan, scheme or schedule of therapy administration which may be prepared by a physician or medical practitioner and may be tailored to suit the patient requiring treatment. The treatment regime may indicate one or more of: the type of therapy to administer to the patient; the dose of each drug; the time interval between administrations; the length of each treatment; the number and nature of any treatment holidays, if any etc. For a co-therapy a single treatment regime may be provided which indicates how each drug/agent is to be administered.

[0036] This term “cancer” refers to the physiological condition in mammals that is typically characterized by unregulated cell growth. The terms “cancer,” “neoplasm,” and “tumor,” are often used interchangeably to describe cells that have undergone a malignant transformation that makes them pathological to the host organism. Primary cancer cells can be distinguished from non-cancerous cells by techniques known to the skilled person. A cancer cell, as used herein, includes not only primary cancer cells, but also cancer cells derived from such primary cancer cell, including metastasized cancer cells, and cell lines derived from cancer cells. Examples include solid tumors and non-solid tumors or blood tumors. Examples of cancers include, without limitation, leukemia, lymphoma, sarcomas and carcinomas (e.g. colon cancer, pancreatic cancer, breast cancer, ovarian cancer, glioblastoma, prostate cancer, lung cancer, melanoma, lymphoma, non-Hodgkin lymphoma, colon cancer, (malignant) melanoma, thyroid cancer, papillary thyroid carcinoma, lung cancer, non-small cell lung carcinoma, and adenocarcinoma of lung.). As is well known, tumors may metastasize from a first locus to one or more other body tissues or sites. Reference to treatment for a “neoplasm”, “tumors” or “cancer” in a patient includes treatment of the primary cancer, and, where appropriate, treatment of metastases.

[0037] As used herein, the term “SNV” is a single nucleotide variant, where the sequence is different from the germline by one base changed into another; also known as a somatic variant.

[0038] As used herein the term “antigen” is a substance, preferably a (poly)peptide that induces an immune response.

[0039] As used herein the term “neoantigen” or “neoantigenic peptide” is an antigen that has at least one alteration that makes it distinct from the corresponding wild-type, parental antigen, e.g., via mutation in a tumor cell. A neoantigen can include a polypeptide sequence or a nucleotide sequence. The term “neoantigenic peptide” also encompasses a nucleotide sequence encoding such neoantigen peptide. A “tumor neoantigen” or “tumor-specific neoantigen” is a neoantigen present in a subject's tumor cell or tissue but not in the subject's corresponding normal cell or tissue. The neoantigen of the present invention are tumor-specific neoantigens.

[0040] As used herein the term “epitope” is the specific portion of an antigen typically bound by an antibody or T cell receptor. As used herein the term “neoepitope” is the specific portion of a neoantigen typically bound by an antibody or T cell receptor.

[0041] The term “peptide” is used herein interchangeably with “mutant peptide” and “neoantigenic peptide” to designate a series of residues, typically L-amino acids, connected one to the other, typically by peptide bonds between adjacent amino acids. Similarly, the term “polypeptide” is used interchangeably with “mutant polypeptide” and “neoantigenic polypeptide” in the present specification to designate a series of residues, typically L-amino acids, connected one to the other, typically by peptide bonds between the adjacent amino acids. The polypeptides or peptides can be a variety of lengths.

[0042] In certain embodiments the size of the at least one neoantigenic peptide molecule may comprise, but is not limited to, about 5, about 6, about 7, about 8, about 9, about 10, about 11, about 12, about 13, about 14, about 15, about 16, about 17, about 18, about 19, about 20, about 21, about 22, about 23, about 24, about 25, about 26, about 27, about 28, about 29, about 30, about 31, about 32, about 33, about 34, about 35, about 36, about 37, about 38, about 39, about 40, about 41, about 42, about 43, about 44, about 45, about 46, about 47, about 48, about 49, about 50, about 60, about 70, about 80, about 90, about 100, about 110, about 120 or greater amino molecule residues, and any range derivable therein. In specific embodiments the neoantigenic peptide molecules are equal to or less than 50 amino acids.

[0043] The neoantigens and polypeptides preferably do not induce an autoimmune response and/or invoke immunological tolerance when administered to a subject.

[0044] As used herein the term “ORF” means open reading frame. As used herein the term “neoORF” is a tumor-specific ORF arising from a mutation, in particular a frameshift mutation as described herein. A “frameshift mutation” is a mutation causing a change in the frame of the protein, for example as the consequence of an indel mutation as described herein.

[0045] Within the context of the current invention the mutation in the tumor cell that gives rise to the neoantigen is a frameshift mutation with a net change of sequence, compared to wildtype, that is not + or −3 nucleotides or a multiplicity thereof (6, 9, 12, 15 etc.). For example the frameshift consists + or −1, 2, 4, 5, 7, 8 . . . nucleotides. As will be understood by the skilled person, the frameshift mutation within the context of the current invention should not create a novel stop triplet on the spot. The frameshift within the context of the current invention gives rise to a neoORF, a novel open reading frame generated in the tumor by insertions, deletions or substitutions that bring in frame sequences encoding completely novel stretches of amino acids. The frameshift mutation within the context of the current invention is a mutation that occurs in the coding region of a gene; i.e. the region that encodes a protein. (Note that the new open reading frame can sometimes extend beyond the stop codon of the wild type gene).

[0046] As used herein the term “immunogenic” is the ability to elicit an immune response, e.g., via T cells, B cells, or both. As used herein, an immunogenic composition is a composition comprising substances, in particular neoantigen with the ability to elicit an immune response. Such composition may for example be a neoantigen-based vaccine based on one or more neoantigens, e.g., a plurality of neoantigens.

[0047] As used herein the term “sequence” can refer to a peptide sequence, DNA sequence or RNA sequence. The term “sequence” will be understood by the skilled person to mean either or any of these, and will be clear in the context provided. For example, when comparing sequences to identify a match, the comparison may be between DNA sequences, RNA sequences or peptide sequences, but also between DNA sequences and peptide sequences. In the latter case the skilled person is capable of first converting such DNA sequence or such peptide sequence into, respectively, a peptide sequence and a DNA sequence in order to make the comparison and to identify the match.

[0048] As used herein the term “exome” is a subset of the genome that codes for proteins. An exome can be the collective exons of a genome.

[0049] As used herein the term “transcriptome” is the set of all RNA molecules is a cell or population of cells. In a preferred embodiment the transcriptome refers to all mRNA.

[0050] As used herein the term “sample” can include a single cell or multiple cells or fragments of cells or an aliquot of body fluid, taken from a subject, by means including venipuncture, excretion, ejaculation, massage, biopsy, needle aspirate, lavage sample, scraping, surgical incision, or intervention or other means known in the art.

[0051] As used herein the term “subject” encompasses a cell, tissue, or organism, human or non-human, whether in vivo, ex vivo, or in vitro, male or female. The term subject is inclusive of mammals including humans. Preferably the subject is a human subject diagnosed with cancer or suspected to have cancer.

[0052] As used herein the term “mammal” encompasses both humans and non-humans and includes but is not limited to humans, non-human primates, canines, felines, murines, bovines, equines, and porcines.

[0053] As used herein, we define a NeoORFeome as the set of all sequences in the human genome that are out of frame with known translated genes, but that as a result of a frame shift mutation can become in frame and encode a novel peptide of at least 8 or 10 amino acids in length before encountering a stop codon. The NeoORFeome is the complete space in which by single frame shift mutations novel peptides of significant length (here defined as 10 amino acids or longer) can be encoded and (potentially) expressed. In other words, the NeoORFeome comprises the complete set of neo Open Reading Frame in the human genome, defined as the sum of open reading frames that are not found in frame in the wild type human genome without mutation, but which by a single insertion/deletion/substitution can be made to be in frame, and then encode a peptide of at minimal length 8, 10 amino acids. The human NeoORFeome as here defined comprises 35,226,335 amino acids, approximately 35 million. This corresponds to approximately 105 Mb (Megabases) of encoding DNA. (The Human Genome is around 3000 Mb.)

[0054] We define herein peptides that are not encoded by the wild type human genome, but after frame shift mutation as defined herein, can be encoded by a tumor genome as a novel open reading frame peptide, or NOP. For any potential NOP in the NeoORFeome the C-terminal sequence is fixed (bounded by the encounter of a stop codon) and not dependent on the precise location of the frame shift mutation; the N-terminus, however, is defined by the mutation site, which is where potentially protein translation shifts into the novel frame. The most upstream novel sequence of a NOP is the most 5′ triplet in the wild type human genome of the Neo Open Reading Frame sequence which is not a stop triplet. We define the master-NOP, also referred to as the pNOP, as the peptide encoded by the longest possible sequence, so from the most upstream triplets as described to the stop triplet at the 3′ end. Sequences of such master-NOPs are represented in the database/library as defined herein.

[0055] Indeed the library of pNOPs is defined as (part of) the subset of the Neo-Orfeome which we found to be the most frequently switched on by frame shift mutation in a very large set of tumor sequence data; it is thus a listing of master NOPs or pNOPs. The listing is for practical purposes categorized in ‘most found’, ‘often found’ and ‘frequently found’, whereby the largest set of pNOPs (frequently found) contains the category often found, which in turn includes the category most found. The complete library contains pNOPs that are encountered in over 30% of all cancers as described in the TCGA database. Based on our analysis for any new tumor of which the genome (or transcriptome or exome or ORFeome—which is also included in any of the embodiments described below referring to genome, exome or transcriptome) is sequenced, the chance is over 30% that it will encode a NOP that is listed in our library as described here. In other words: the library can potentially provide to over 30% of all cancer patients.

### DETAILED DESCRIPTION

[0056] NOP sequences (also known as neo Open Reading Frames, neoORFs) have been previously described as potential cancer vaccines. See, for example, WO95/32731, WO2016172722 (Nantomics), WO2016/187508 (Broad), WO2017/173321 (Neon Therapeutics), US2018340944 (University of Connecticut), and WO2019/012082 (Nouscom), as well as Rahma et al. (Journal of Translational Medicine 2010 8:8) which describes peptides resulting from frameshift mutations in the von Hippel-Lindau tumor suppressor gene (VHL) and Rajasagi et al. (Blood 2014 124(3):453-462) which reports the systematic identification of personal tumor specific neoantigens.

[0057] Surprisingly, the present disclosure provides NOP sequences that are shared among cancer patients. The finding of shared NOP sequences is used for a methodological innovation that defines a library of NOP sequences and a strategy to match one or more NOPs encoded by any tumor genome sequence with the library of NOP sequences, to select preferred sequences for design of a vaccine for treatment of said tumor. The library of NOP sequences disclosed herein and the recognition that such NOP sequences are shared among cancer patients was not previously described in the art.

[0058] It is contemplated that any method, use or composition described herein can be implemented with respect to any other method, use or composition described herein. Embodiments discussed in the context of methods, use and/or compositions of the invention may be employed with respect to any other method, use or composition described herein. Thus, an embodiment pertaining to one method, use or composition may be applied to other methods, uses and compositions of the invention as well.

[0059] As embodied and broadly described herein, the present invention is directed to the surprising finding that it is possible to provide a library of limited size that comprises (sequences of) neo open reading frame peptides that are found in tumor material of patients as the consequence of frameshift mutations that lead to a new open reading frame with a novel, common, tumor- specific protein sequence towards the C-terminal end. By comparing sequence information from a tumor sample of a patient with the library it has now become possible to quickly identify whether there is a match between a sequence identified in the patients material with a sequence in the database. A match is identified when a sequence identified in the patients material and a sequence from the database have a string, i.e. a peptide sequence (or RNA or DNA sequence encoding such peptide (sequence) in case the comparison is on the level of RNA or DNA) in common representative of at least 8, preferably at least 10 adjacent amino acids. The thus identified tumor-specific mutant polypeptide encoded by a tumor-specific frameshift mutation in (expressed) genes of the subject having cancer can be used to provide for neoantigens comprising a tumor-specific neoepitope. With the limited libraries as provided herein, and based on the actual amount of sequences in the database (as described herein elsewhere) it is estimated that between about 5-30% of the population of patients having cancer can be provided with a subject-specific and tumor-specific immunogenic composition comprising one or more neoantigens based on one or more matches between sequence identified in the patients material and a sequence from the database.

[0060] In some more detail, it was realized by the inventor of the present invention that with the human genome being about 3×10⁹ base pairs, about 1.5% of which is coding for protein, the number of possible point-mutations (nucleotide changes or SNVs) is virtually infinite, especially since each position can mutate into three others, and of course endless other rearrangements and indels are possible. Therefore the number of possible neoantigens that arise in tumors is also huge.

[0061] In the present invention a specific window of cancer mutations is described. This window is derived from the reference human genome sequence. While the 3×10⁹ base pairs can mutate in infinite ways, there is only a limited repertoire of possible neoantigens dictated by the coding (and expressed) part of the human genome sequence. The ORFeome (the complete set of open reading frames (ORFs) in a genome), as it has been referred to, is ‘meant’ to be read in the proper reading frame. However, there are two other frames of each gene, the −1 and +1. These alternative frames do not necessarily encode relevant peptides, since they may run into a stop triplet fast. The present inventors have now defined that part of the genome that encodes peptides resulting from out of frame translation, and that are at least the size of a potential epitope when it is seen as a neoantigen. These peptides are referred to as the neo open reading frame peptides, or NOPs. The maximal coding region for each of these NOPs (which we refer to as the master NOP or pNOP, for potential NOP) begins immediately downstream of a stop triplet in the reference human genome sequence, contains then at least ten amino acid-encoding triplets, and finishes with a stop.

[0062] Thus each gene as defined in the reference genome sequence includes a set of pNOPs. These NOPs are commonly not expressed in the human body, and if they were they would therefore be seen by the immune system as entirely foreign. Since, other than SNV-neoantigens, they are not a small change in a known peptide chain, but a longer stretch of foreign amino acid sequence, it is a priori to be expected that these NOPs are seen by the immune system on average as much more foreign and antigenic than SNV-neoantigens.

[0063] But how can these NOPs (or parts thereof) be expressed in a tumor of a patient? In the present invention we limit ourselves to simple insertions and deletions in coding regions, which—in order to cause a frame shift—could be of any length, but should not have a length that is 3 nucleotides or a multiple of 3 nucleotides, and should not create a novel stop triplet on the spot. Again, the set of such frame shift causing mutations is, like the set of SNV-causing mutations, virtually infinite: at every position in the 1.5% coding region of the genome almost any insertion or deletion (or net result from insertion plus deletion) of net change of sequence of + or −1, 2, 4, 5, 7, 8 etc. nucleotides could bring a NOP in frame.

[0064] We have assumed and tested that in the first approximation frame shift mutations (like SNVs) can occur at any position in the genome and the basic assumption is that the sites and + or − nature of frame shift mutations are more or less randomly distributed, or in other words that within a gene every nucleotide is a potential position for a frame shift mutation to occur, and thus a new NOP to be put into frame. We tested that assumption by extracting from the The Cancer Tumor Genome Atlas (TOGA), which consists of 11,300 whole genome sequenced human tumors covering 34 major tumor types, all frame shift mutations in just one gene. FIG. 1 panel a shows all the point mutations in that gene, and indeed these seem reasonably equally distributed over the gene. FIG. 1 panel b shows the pNOPs as defined above: all the potential NOPs that could in theory arise as result of a frame shift. FIG. 1 panel b also shows the results: the frame shift causing insertions/deletions are shown in small black letter print, followed by the patient specific NOP. The figure clearly shows several findings: 1. the assumption that frame shifts are a priori spread continuously over the gene stands (for this gene) confirmed: there is an almost continuous and straight diagonal line through the sites where the NOP is put into frame. 2. Frame shifts are (like SNVs) almost all different. It is rare that among 11,300 different tumors from different patients we find the same SNV or the same frame shift. 3. Most importantly: in spite of the fact that almost all of these frame shift mutations are different and occur at a different precise position, they all cause a (portion of) the same NOP to go into frame, and certainly all cause the identical C-terminus of that NOP. 4. The size of the TOGA is such that the pattern of frame shift mutations is almost saturated in the sense that many of the positions that can mutate to turn on a NOP are likely to have been hit in this dataset.

[0065] The conclusion of the analysis of the gene in FIG. 1 caused the inventor to realize that it may not be needed to further discover NOPs by analysis of patients, because the potential of these NOPs is defined by the description of the (entire) set of pNOPs as disclosed herein as defining (part of) the library.

[0066] In other words a library can be provided that comprises sequences (DNA, RNA or peptide) that correlates to and comprises the sequence of potential neo open-reading-frame peptides that can occur in a patient as the consequence of frameshift mutations as defined herein and occurring in a gene in the patient. Depending on where such frameshift mutation occurs in a gene, the length of an individual's neo open-reading frame peptide can vary between individuals, however the sequences provided in the library or database dose comprise such varying lengths of individual neo open reading frames and may therefore also be referred to as a master NOP (see FIGS. 1 and 2). In other words the master NOP sequence provided in the library/database comprises the NOP sequences part of which (or the entirety) may occur in individual patients as the consequence of a frame shift mutation as defined herein. By comparing sequence information from a new patient, a match between a sequence in the tumor material of the patient and such master NOP in the database may be recognized, thus allowing to identify a neoantigen that is specific for that subject and specific for that tumor. Based thereupon, using methodology well-known to the skilled person it is possible to provide a vaccine based on said identified neoantigen (or more than one neoantigen). The library is of such extent that, depending on the inclusion of more or less of the sequences with SEQ ID NO 1-1989 disclosed herein (or of course nucleotide sequences encodes such peptide sequences) more than 5, 7.5, 10, 20, even up to 30% or more of patients suffering from cancer are expected to have at least one, or more, neoantigen in the tumor and that can be detected by comparing to the library/database as provided herein.

[0067] The results that are shown below confirm the conclusion above that the chance of any NOP to arise by a frame shift at a certain position seems in first approximation random. But whether these mutations will be represented in the tumor of a patient is far from random. The TOGA, which, given its size and scope, provides a high resolution picture of all genetic events that will ever be found in the tumor of a patient, shows that for some genes there is a really dense pattern of NOPs, while others seem to be represented very rarely.

[0068] It was further realized by the present inventor that for SNVs as a rule every SNV in a gene in a tumor is different, and thus every neoantigen is different. For the pNOPs as described herein, the data shows that within that pNOP virtually every frame shift is different, but every NOP is the same, at least at its C-terminus. Thus within each NOP the genome acts as a funnel: it will absorb frame shift mutations, that occur at different sites and are of different sequence, but they will trigger expression of the same NOP, at least for the C-terminus part of it.

[0069] It has been observed before that some genes are often hit in cancer because they are human cancer driver genes. We screened the TOGA for our set of pNOPs and asked: how often is each of them represented in the set of tumors. Table 1 shows the result. An impressive list of all usual suspects shows up if we rank the NOPs that are actually found in human cancers.

TABLE1
Most often encountered genes
#gene symbol

| #H: val | count |
|---|---|
| TP53 | 308 |
| ARID1A | 206 |
| TTN | 201 |
| KMT2D | 171 |
| MUC16 | 118 |
| APC | 118 |
| PTEN | 95 |
| KMT2C | 84 |
| GATA3 | 82 |
| ATRX | 80 |
| NF1 | 79 |
| CDKN2A | 77 |
| FAT1 | 70 |
| ZFHX3 | 70 |
| KMT2B | 69 |
| PBRM1 | 69 |
| CIC | 65 |
| PCLO | 61 |
| VHL | 58 |
| MAP3K1 | 57 |
| ZFHX4 | 57 |
| KDM6A | 54 |
| RB1 | 54 |
| NOTCH1 | 52 |
| ARID2 | 51 |
| CDH1 | 50 |
| MUC5B | 49 |
| PIK3R1 | 49 |
| OBSCN | 48 |
| CSMD3 | 48 |
| USH2A | 47 |
| NEB | 45 |
| SOX9 | 44 |
| SYNE1 | 44 |
| BRCA2 | 42 |
| SETD2 | 42 |
| TG | 42 |
| ARHGAP35 | 41 |
| HMCN1 | 41 |
| BAP1 | 41 |
| LRP1B | 41 |
| MGA | 40 |
| ZFP36L1 | 40 |
| CUBN | 40 |
| CCDC168 | 39 |
| SPEN | 38 |
| FAT2 | 38 |
| FAT3 | 37 |
| SYNE2 | 37 |
| ELF3 | 37 |
| MBD6 | 37 |
| CREBBP | 37 |
| BCOR | 36 |
| ZNF292 | 36 |
| AHNAK2 | 35 |
| KMT2A | 35 |
| APOB | 35 |
| KIAA1217 | 35 |
| CDK12 | 34 |
| ATM | 34 |

[0070] It is to be noted that the tumors in the TCGA are of different people, with different disease (one will be a Caucasian with a glioblastoma, the other of Japanese descent with a colon cancer,) but they have one thing in common: they have cancer. That means that with the funneling effect described above a library of limited size containing NOPs and that applies to many different tumors in different people can be provided.

[0071] In summary, the present invention is based on the surprising finding of a library of limited size of potential neo open reading frame peptides (pNOPs) that contain (peptide) sequences that have, by a frame shift mutation, corresponding peptides in up to and over 30% of all cancer patients.

[0072] The relevance of the present invention is there for twofold:
[0073] Independent of the precise type of delivery (DNA, RNA, recombinant organism, peptide, recombinant protein) there is the potential to generate a library of antigenic peptides (or DNA, RNA, etc. thereof) in advance, and store it, such that after genome sequencing of a sample from a subject with cancer the relevant reagents can be provided off the shelf. With some tumor types showing a patient's expected life span after diagnosis of less than a year (e.g. pancreas of glioblastoma) this may save critical months before treatment onset. It will also create great advantages of scale that will eventually reduce cost.
[0074] Since the library of vaccines is limited, one may keep track of the precise peptide or mixture of peptides that works best.

[0075] Generally speaking and in one embodiment, the workflow for providing an antigenic peptide for use in an immunogenic composition is as follows. When a patient is diagnosed with a cancer for example a biopsy may be taken from the tumor, or a sample set is taken of the tumor after resection. The genome, exome or transcriptome is sequenced by existing methods. The outcome is compared, for example using a web interface or software, to (part of) the pNOP set in our database. This will identify and display hits. In turn a patient and/or physician can, if they desire, be informed whether or not hits have been found. On average this is expected for up to 30% of the cases. If matches are found, the order can be given to provide a vaccine corresponding to the personal NOPs of the patient. This is fully personalized vaccination, since no vaccine will be provided that is not expected to be of potential benefit. If patients have in their tumors NOPs that are significantly longer than 20 amino acids, it is preferred that multiple peptides of overlapping sequence are provided. If the only NOPs are relatively short one may choose to incorporate these potential neoantigens in a longer peptide sequence, by adding additional sequences that flank it (to ensure proper processing via the proteasome). The limited size of the library makes it more practical to synthesize, purify, check and store and supply under the relevant regulatory terms.

[0076] In its broadest sense there is provided for a method of identifying at least one neoantigen in a cancer patient by identifying a match between a neo open reading frame peptide present in the tumor of the patient and a sequence in a database of sequences (DNA. RNA or peptide) representing the master neo open reading frame peptides as defined herein. The thus identified neoantigen can be used to prepare an immunogenic composition useful in the treatment of the patient.

[0077] More in particular there is provided for a method of identifying at least one neoantigen for preparing a subject-specific immunogenic composition the method comprising:
[0078] identifying a match between at least one sequence or portion thereof in a set of sequences obtained from a subject-specific tumor genome, exome or transcriptome by complete, targeted or partial genome, exome, or transcriptome sequencing
[0079] by comparing the at least one sequence or portion thereof with a database of nucleotide and/or polypeptide sequences, wherein the sequences in the database are represented by at least 147 sequences selected from SEQ. ID. No. 1-1989, preferably by at least SEQ ID.NO 1-147,
[0080] wherein a match is identified when the at least one sequence or portion thereof and a sequence from the database have a string in common representative of at least 8, preferably at least 10 adjacent amino acids,
[0081] to thereby identify a tumor-specific neoantigen encoded by a tumor-specific frameshift mutation in genes of the subject having cancer,
[0082] and optionally, repeating the method for a further sequence or portion thereof from the set of sequences of the subject-specific tumor genome, exome or transcriptome.

[0083] In another embodiment there is provided for a method of identifying at least one neoantigen for preparing a subject-specific immunogenic composition the method comprising:
[0084] a. performing complete, targeted or partial genome, exome, or transcriptome sequencing of at least one tumor sample obtained from a subject having cancer to obtain a set of sequences of the subject-specific tumor genome, exome or transcriptome;
[0085] b. comparing at least one sequence or portion thereof from the set of sequences with a database of nucleotide and/or polypeptide sequences, wherein the sequences in the database are represented by at least 147 sequences selected from SEQ. ID. No. 1-1989, preferably by at least SEQ ID.NO 1-147;
[0086] c. identifying a match between the at least one sequence or portion thereof from the set of sequences and a sequence in the database when they have a string in common representative of at least 8, preferably at least 10 amino acids to thereby identify a tumor-specific neoantigen encoded by a tumor-specific frameshift mutation in genes of the subject having cancer; and optionally
[0087] d. repeating steps b.-c. for a further sequence or portion thereof, from the set of sequences of the subject-specific tumor genome, exome or transcriptome.

[0088] In the method, a match is identified by comparing between at least one sequence or portion thereof in a set of sequences obtained from a subject-specific tumor genome, exome or transcriptome by complete, targeted or partial genome, exome, or transcriptome sequencing.

[0089] The set of sequences are preferably obtained by taking a sample from a tumor of the patient. The skilled person knowns how to obtain samples from a tumor of a patient and depending on the nature, for example location or size, of the tumor. Preferably the tumor is a solid tumor. Preferably the sample is obtained from the patient by biopsy or resection. The sample is obtained in such manner that is allows for sequencing of the genetic material obtained therein. In order to prevent a less accurate identification of at least one antigen, preferably the sequence of the tumor sample obtained from the patient is compared to the sequence of other non-tumor tissue of the patient, usually blood, obtained by known techniques (e.g. venipuncture).

[0090] Sequencing of the genome, exome or transcriptome may be complete, targeted or partial. In some embodiments the sequencing is complete (whole sequencing). In some embodiments the sequencing is targeted. With targeted sequencing is meant that purposively certain region or portion of the genome, exome or transcriptome are sequenced. For example targeted sequencing may be directed to only sequencing for sequences in the set of sequences obtained from the cancer patient that would provide for a match with one or more of the sequences in the database, for example by using specific primers. In some embodiment only portion of the genome, exome or transcriptome is sequenced. Otherwise stated, targeted sequencing may be performed in order to determine whether there is a match with each of SEQ ID.NO 1-147, preferably to determine whether there is a match with each of SEQ ID Nos 1-1989. The skilled person is well-aware of methods that allow for whole, targeted or partial sequencing of the genome, exome or transcriptome of a tumor sample of a patient. For example any suitable sequencing-by-synthesis platform can be used including the Genome Sequencers from Roche/454 Life Sciences, the 1G Analyzer from Illumina/Solexa, the SOLiD system from Applied BioSystems, and the Heliscope system from Helicos Biosciences. The method of sequencing the genome, exome or transcriptome is not in particular limited within the context of the present invention.

[0091] In some preferred embodiments the genome is sequenced. In some preferred embodiments the exome is sequenced. In some preferred embodiments the transcriptome is sequenced. Preferably the transcriptome is sequenced, in particular the mRNA present in a sample from a tumor of the patient. The transcriptome is representative of genes and neo open reading frame peptides as defined herein being expressed in the tumor in the patient.

[0092] Following sequencing of the tumor, using any sequencing method known in the art, the tumor sequences are aligned and compared to a reference genome. Sequence comparison can be performed by any suitable means available to the skilled person. Indeed the skilled person is well equipped with methods to perform such comparison, for example using software tools like BLAST and the like, or specific software to align short or long sequence reads, accurate or noisy sequence reads to a reference genome, e.g. the human reference genome GRCh37 or GRCh38. A match is identified when a sequence identified in the patients material and a sequence as disclosed herein have a string, i.e. a peptide sequence (or RNA or DNA sequence encoding such peptide (sequence) in case the comparison is on the level of RNA or DNA) in common representative of at least 8, preferably at least 10 adjacent amino acids. Furthermore, sequence reads derived from a patients cancer genome (or transcriptome) can partially match the genomic DNA sequences encoding the amino acid sequences as disclosed herein, for example if such sequence reads are derived from exon/intron boundaries or exon/exon junctions, or if part of the sequence aligns upstream (to the 5′ end of the gene) of the position of a frameshift mutation. Analysis of sequence reads and identification of frameshift mutations and their protein products will occur through standard methods in the field. For sequence alignment, aligners specific for short or long reads can be used, e.g. BWA (Li and Durbin, Bioinformatics. 2009 Jul. 15;25(14):1754-60) or Minimap2 (Li, Bioinformatics. 2018 Sep. 15;34(18):3094-3100). Subsequently, frameshift mutations can be derived from the read alignments and their comparison to a reference genome sequence (e.g. the human reference genome GRCh37) using variant calling tools, for example Genome Analysis ToolKit (GATK), and the like (McKenna et al. Genome Res. 2010 September;20(9):1297-303). The out-of-frame protein products (NOPs) resulting from frameshift mutations can be identified following the genetic triplet code known in the field and a database of reference sequences as publicly available through e.g. Ensembl, UCSC, NCBI or other sequence resources.

[0093] The match is identified by comparing at least one sequence or portion obtained from sequences in the genome, exome or transcriptome of the subject having cancer with a database of nucleotide and/or polypeptide sequences as defined herein, wherein the sequences in the database are represented by at least 147 sequences selected from SEQ. ID. No. 1-1989, preferably by at least SEQ ID.NO 1-147.

[0094] As used herein the term “the sequences in the database are represented by at least xxx sequences” indicates that the database may comprise of said xxx sequences or part of a sequence (e.g. a sequence of at least 8 or 10 adjacent amino acids present in a sequence comprised in the set of xxx sequences) or may comprise of DNA or RNA sequences encoding for such sequences or part of said sequences (e.g. a DNA or RNA sequence encoding a sequence of at least 8 or 10 adjacent amino acids present is said sequence comprised in the set of xxx sequences representing the database). In other words, the database is represented by DNA, RNA or peptide sequences that represent, encode or define (part of) the master NOPS as disclosed herein.

[0095] In some embodiment the database is represented by at least 1, 20, 50, 100, 140, 147, 200, 250, 500, 800, 960, 1000, 1200, 1500, 1750 or 1989 sequences selected from SEQ. ID. No. 1-1989, preferably by at least SEQ. ID. No. 1-20, SEQ. ID. No. 1-50, SEQ. ID. No. 1-100, SEQ. ID. No. 1-140, SEQ. ID. No. 1-147, SEQ. ID. No. 1-200, SEQ. ID. No. 1-250, SEQ. ID. No. 1-500, SEQ. ID. No. 1-800, SEQ. ID. No. 1-960, SEQ. ID. No. 1-1000, SEQ. ID. No. 1-1200, SEQ. ID. No. 1-1500, SEQ. ID. No. 1-1750, SEQ. ID. No. 1-1989. It was found the more sequences are selected from the SEQ. ID. No. 1-1989, the more patients will be identified to have at least one neo open reading frame peptide or neoantigen is a tumor. The sequences in the database are sorted by the frequency they match with an individual's neo open reading frame or neoantigen in the population of cancer patients studied.

[0096] Comparing of at least one sequence or portion thereof (i.e. part of the at least one sequence, preferably wherein the part is representative of at least 8 or 10 amino acids) from the set of sequences and a (DNA, RNA or peptide) sequence in the database can be done by any suitable mean available to the skilled person. Indeed the skilled person is well equipped with method to perform such comparison, for example using software tools like BLAST and the like.

[0097] A match between the at least one sequence or portion thereof from the set of sequences and a (DNA, RNA or peptide) sequence in the database is identified when they have a string in common representative of at least 8, preferably at least 10 amino acids to thereby identify a tumor-specific (mutant) neoantigen encoded by a tumor-specific frameshift mutation in genes of the subject having cancer. In other words, a match is identified when the sequence from the patient and a sequence in the database share, i.e. both comprise, at least 8, preferably at least 10 adjacent amino acids (or an equivalent number of nucleotides when DNA or RNA is compared). In that respect it is relevant to note that a match is also identified when the DNA or RNA sequences compared are different but both encode for the same stretch of at least 8, preferably at least 10 amino acids. The methods may also comprise determining the presence or absence in a tumor of each NOP represented in the libraries disclosed herein.

[0098] In a preferred embodiment a substantial part, preferably all of the sequences from the set of sequences obtained by sequencing the genome, exome or transcriptome are compared with the database.

[0099] Since the database is comprised of sequences comprising/representing neo open reading frame peptides that were identified in patients and appear as the consequence of a frame shift mutation as disclosed herein, a match with a sequence obtained from a tumor of the patient indicates that said patient comprises a frame shift mutation that leads to the appearance of a neo open reading frame encoding for a neo open reading frame peptide/neoantigen having a sequence that is comprised in at least one sequence in the database.

[0100] The invention thus also provides for a method of identifying a frame shift mutation as defined herein in a tumor in a patient and/or identifying of a neo open reading frame encoding for neo open reading frame peptide or neoantigen present in the tumor of the patient. With the method such neo open reading frame peptide(s) or neoantigen(s) may be detected in the patient.

[0101] As will be understood such identified neo open reading frame peptide or neoantigen may suitable be used for preparing an immunogenic composition, for example a vaccine, using any suitable method or system available to the skilled person.

[0102] Once a match has been found between a patients' tumor sequence and a sequence in the database, i.e. comprising the master-neo open reading frame peptide (NOP), an immunogenic composition, for example a vaccine will be made available to immunize the patient against his/her tumor. In general there are different, non-limiting, ways in which the actual vaccine can be provided:
[0103] 1. Synthetic peptides. Depending on the length of the neo open reading frame peptide or neoantigen the actual vaccine can be a single peptide (e.g. of 20 amino acids), or a series of tiled peptides (e.g. if the NOP is 80 amino acids long, the vaccine can be the sum of 7 peptides of 20 amino acids with each time 10 amino acids overlap).
[0104] 2. Nucleic acids encoding the neo open reading frame peptide or neoantigen. This can be an appropriately packaged or formulated RNA or DNA preparation that can contain the sequence encoding the NOP or a part of it. For such a construct no tiling is necessary, since an open reading frame of tens to hundreds of triplets can easily be generated.
[0105] 3. A recombinant organism (a virus, or e.g. a genetically modified Listeria bacterium as used in other contexts), in this case expressing the (or part of the) (master) NOP may be used.
[0106] 4. In a fourth application the immune system of the patient is not vaccinated but boosted in another way, based on the hit between the patient's tumor sequence and the NOP-library: this involves, for example, identifying a mouse or human T-cell which recognizes the antigen and which can be engineered into any CAR-T construct and used to direct a T-cell line against that neo open reading frame peptide or neo antigen or part thereof.

[0107] In some embodiments, the vaccine comprises a pharmaceutically acceptable excipient and/or an adjuvant. The compositions may contain pharmaceutically acceptable auxiliary substances as required to approximate physiological conditions, such as pH adjusting and buffering agents, tonicity adjusting agents, wetting agents and the like. Suitable adjuvants are well-known in the art and include but are not limited to, aluminum (or a salt thereof, e.g., aluminium phosphate and aluminium hydroxide), monophosphoryl lipid A, squalene (e.g., MF59), montanide, hiltonol, poly-ICLC (polyriboinosinic-polyribocytidylic acid-polylysine carboxymethylcellulose), liposomes (e.g. CAF09, cationic adjuvant formulation 09), Amplivant, Resiquimod, Iscomatrix and cytosine phosphoguanine (CpG). A skilled person is able to determine the appropriate adjuvant, if necessary, and an immune-effective amount thereof. As used herein, an immune-effective amount of adjuvant refers to the amount needed to increase the vaccine's immunogenicity in order to achieve the desired effect.

[0108] In some embodiments, the vaccine can be used as treatment of a tumor, wherein the genome sequence of said tumor is sequenced, NOP sequences are defined based on the genome sequence and a vaccine is prepared based on the NOP sequence for administration to a patient with cancer. The vaccine may be administered during any time after diagnosis of the cancer.

[0109] The disclosure further provides the use of neoantigens and vaccines disclosed herein in prophylactic methods for preventing or delaying the onset of cancer. The vaccine may be specifically used in a prophylactic setting for individuals that have an increased risk of developing cancer. For example, prophylactic vaccination is expected to provide possible protection for up to 50% of all cancers. In some embodiments, the prophylactic vaccination methods are used for individuals who have a genetic cancer predisposition mutation. In some embodiments, the prophylactic methods are useful for individuals who are genetically related to individuals afflicted with cancer. In some embodiments, the prophylactic methods are useful for the general population.

[0110] In some embodiment the database (or library) is identified by at least 147 sequences selected from SEQ. ID. No. 1-1989, preferably wherein the sequences in the database are identified by at least SEQ ID.NO 1-147. It was found that with a database of that size about 5-10% of the population of cancer patients is expected to match with at least one or more of the sequences in the database.

[0111] In some embodiment the database (or library) is identified by at least 960 sequences selected from SEQ. ID. No. 1-1989, preferably wherein the sequences in the database are identified by at least SEQ ID.NO 1-960. It was found that with a database of that size about 17-23% of the population of cancer patients is expected to match with at least one or more of the sequences in the database.

[0112] In some embodiment the database (or library) is identified by at least 1989 sequences selected from SEQ. ID. No. 1-1989, preferably wherein the sequences in the database are identified by at least SEQ ID.NO 1-1989. It was found that with a database of that size about 27-33% of the population of cancer patients is expected to match with at least one or more of the sequences in the database.

[0113] It will be understood by the skilled person that the database may vary in size (number of sequences selected from SEQ. ID. No. 1-1989) without leaving the inventive gist of the present invention. However, in a preferred embodiment the database should be of such size that at least 5%, 6%, 7% . . . 10%, 11% . . . 15%,16% . . . 19%,20%, . . . 24%,25%, . . . 28%, 29% or more of the population of cancer patient (is expected to) match with at least one or more of the sequences in the database.

[0114] Also provided is for a method as described herein wherein a plurality of neoantigens for preparing a subject-specific immunogenic composition are identified. As described in the example, it was found that more than one neo open reading frame peptide may be recognized in in the tumor material of the patient using the method described herein. Therefore, in some embodiments 1, 2, 3, 4, 5, 6, 7, 8, 9, 10 or more neo open reading frame peptides or neoantigen may be identified in the material obtained from a tumor of the patient. The one or plurality or neo open reading frame peptides or neoantigens (or DNA or RNA encoding such antigens) may be used in preparing the immunogenic composition of the present invention.

[0115] It will be understood by the skilled person that the neo open reading frame peptides or antigens identified may be a varying length, for example may be about 8-10 amino acids in length, greater than 10 amino acids in length, greater than 15 amino acids in length, greater than 30 amino acids in length, or greater than 50 amino acids in length. It will also be understood by the skilled person that the immunogenic composition (e.g. vaccine) may comprise peptides (or DNA or RNA encoding such peptides) that are based on the neo open reading frame peptides or neoantigen identified in the tumor of the patient may be of the same length as the neo open reading frame peptides or neoantigen identified in the tumor or may comprise only part of said neo open reading frame peptides or neoantigen identified in the tumor. Preferably the peptide used in the immunogenic composition is at least 8-10 amino acids in length (or, in case of DNA or RNA encoding such peptide, an equivalent number of nucleotides (e.g. 24-30 nucleotides)). For example in case the neo open reading frame peptides or neoantigen identified in the tumor has a length of 20 amino acids, the peptide to be used in the immunogenic composition may be 8-20 amino acids in length (preferably 10-20 amino acids in length). The skilled person will also understand that more than one peptide may be included in the immunogenic composition based on the neo open reading frame peptide or neoantigen identified. For example in case the neo open reading frame peptide or neoantigen identified in the patient has a length of 80 amino acids, more than one peptide based on said neo open reading frame peptide may be included in the immunogenic composition. For example a first peptide of, for example 10-40 amino acids may be included and a second, different peptide comprising 10-40 amino acids may be included. The peptides may or may not overlap in sequence. Preferably the peptides (or RNA or DNA encoding such peptides) to be included in the immunogenic composition do not induce an autoimmune response in the patient. Preferably the peptides in the immunogenic composition have a length of 18 amino acids or more (in case of RNA or DNA an equivalent length of the nucleotide sequence may be used, or longer sequences).

[0116] In another embodiment the method further comprises comparing at least one sequence or portion thereof from the set of sequences of the subject-specific tumor genome, exome or transcriptome with sequences obtained by complete, targeted or partial genome, exome, or transcriptome (e.g. nucleic acid) sequencing of a normal tissue sample obtained from the subject having cancer. Although not required in the method according to the current invention, this step does allow ensuring that the recognized neo antigen open reading frame is not comprised/expressed in healthy tissue of the patient thereby ensuring the identified neo open reading frame peptide or neoantigen (comprising a neo epitope) is unique for the tumor of the patient (as compared to its healthy tissue). The pNOPs listed in the accompanying Sequence Listing have been filtered for absence in the wild type ORFeome; i.e. the pNOPs are not found in wild type ORFeome.

[0117] In another embodiment there is provided for a method of treating cancer in a subject comprising administering to the subject (A) a subject-specific immunogenic composition prepared based on a neoantigen identified with the method described herein above. Preferably the composition comprises a therapeutic amount of one or a plurality of neoantigens identified with the method described herein above. The immunogenic composition may comprise antigenic peptides or DNA or RNA encoding such antigenic peptides or combinations thereof as identified with the method disclosed herein. The skilled person knows how to prepare, test and administer such immunogenic compositions and may use any method or system available in the art.

[0118] Also disclosed herein are compositions that comprise at least two or more peptides or neoantigens. In some embodiments the composition contains at least two distinct peptides. Preferably, the at least two distinct peptides are or are not derived from the same neo open reading frame peptide identified in the patient. By distinct polypeptides is meant that the peptide vary by length, amino acid sequence or both.

[0119] Also disclosed herein, the immunogenic composition or vaccine is capable of raising a specific T-cell response. The vaccine composition comprises mutant peptides and mutant polypeptides corresponding to tumor specific neoantigens identified by the methods described herein. A person skilled in the art can, when desired, select preferred peptides by testing, for example, the generation of T-cells in vitro as well as their efficiency and overall presence, the proliferation, affinity and expansion of certain T-cells for certain peptides, and the functionality of the T-cells, e.g. by analyzing the IFN-γ production or tumor killing by T-cells. However this is not required, given that NOPs are in their entirety foreign to the body and thus potentially highly antigenic.

[0120] In some embodiment the method of treatment above further comprises administering to the subject (B) an anti-CTLA agent, an anti-PD-1 agent, an anti-PD-L1 agent or a combination thereof, wherein (A) and (B) are administered simultaneously or sequentially.

[0121] The neoantigenic peptide or vaccine composition can be administered alone or in combination with other therapeutic agents. The therapeutic agent is for example, a chemotherapeutic agent, radiation, or immunotherapy. Any suitable therapeutic treatment for a particular, cancer may be administered. Examples of chemotherapeutic agents include, but are not limited to bleomycin, capecitabine, carboplatin, cisplatin, cyclophosphamide, docetaxel, doxorubicin, etoposide, interferon alpha, irinotecan, lansoprazole, levamisole, methotrexate, metoclopramide, mitomycin, omeprazole, ondansetron, paclitaxel, pilocarpine, rituxitnab, tamoxifen, taxol, trastuzumab, vinblastine, and vinorelbine tartrate.

[0122] The subject may, in some embodiments, be further administered an anti-immunosuppressive/immunostimulatory agent. For example, the subject is further administered an anti-CTLA antibody or anti-PD-1 or anti-PD-L1. Blockade of CTLA-4 or PD-L1 by antibodies can enhance the immune response to cancerous cells in the patient. In particular, CTLA-4 blockade has been shown effective when following a vaccination protocol.

[0123] The optimum amount of each peptide to be included in the vaccine composition and the optimum dosing regimen can be determined by one skilled in the art without undue experimentation. The composition may be prepared for injection of the peptide, DNA or RNA encoding the peptide. For example, doses of between 1 and 500 mg 50 μg and 1.5 mg, preferably 125 μg to 500 μg, of peptide or DNA may be given and will depend from the respective peptide or DNA. Other methods of administration of the immunogenic compositions are known to the skilled person.

[0124] The immunogenic composition may be prepared so that the selection, number and/or amount of peptides present in the composition is/are tissue, cancer, and/or patient-specific. The selection may be dependent on the specific type of cancer, the status of the disease, earlier treatment regimens, the immune status of the patient, and, HLA-haplotype of the patient. Furthermore, the vaccine can contain individualized components, according to personal needs of the particular patient. Examples include varying the amounts of peptides according to the expression of the related neoantigen in the particular patient.

[0125] In therapeutic applications, compositions are administered to a patient in an amount sufficient to elicit an effective CTL response to the tumor antigen and to cure or at least partially arrest symptoms and/or complications. An amount adequate to accomplish this is defined as “therapeutically effective dose.”

[0126] For therapeutic use, administration should preferably begin at or shortly after the detection or surgical removal of tumors. This is followed by boosting doses until at least symptoms are substantially abated and for a period thereafter. For that reason being able to provide the immunogenic composition off-the-shelf or in a short period of time is very important. Preferably, the immunogenic compositions are administered parenterally, e.g., intravenously, subcutaneously, intradermally, intramuscularly, or otherwise. The compositions may contain pharmaceutically acceptable auxiliary substances as required to approximate physiological conditions, such as pH adjusting and buffering agents, tonicity adjusting agents, wetting agents and the like.

[0127] For therapeutic purposes, nucleic acids encoding the peptide and optionally one or more of the peptides described herein can also be administered to the patient. A number of methods are conveniently used to deliver the nucleic acids to the patient. For instance, the nucleic acid can be delivered directly, as “naked DNA”. The peptides and polypeptides can also be expressed by attenuated viral hosts, such as vaccinia or fowlpox. This approach involves the use of vaccinia virus as a vector to express nucleotide sequences that encode the peptide. Upon introduction into the subject the recombinant vaccinia virus expresses the immunogenic peptide, and thereby elicits a host CTL response. Vaccinia vectors and methods useful in immunization protocols are described in, e.g., U.S. Pat. No. 4,722,848. Another vector is BCG (Bacille Calmette Guerin) as described in Stover et al. (Nature 351:456-460 (1991)).

[0128] According to another aspect there is provided for a computerized system for identifying a match in the method as described herein the system comprising:
[0129] a first database configured to store information regarding at least one sequence in a set of sequences obtained from a subject-specific tumor genome, exome or transcriptome obtained by complete, targeted or partial genome, exome, or transcriptome sequencing;
[0130] a second database configured to store information regarding at least 147 sequences selected from SEQ. ID. No. 1-1989, preferably at least SEQ ID.NO 1-147;
[0131] a processor configured to perform instructions for identifying a match by comparing at least one sequence in the set of sequences from a subject-specific tumor genome, exome or transcriptome in the first database with the sequences in the second database,
[0132] wherein a match is identified when they have a string in common representative of at least 8, preferably at least amino acids, to thereby identify a tumor-specific neoantigen encoded by a tumor-specific frameshift mutation in genes of the subject having cancer.

[0133] Embodiments, preferences and aspects already described herein above with respect to the method of identifying and the method of treatment likewise apply to the above embodiment.

[0134] The computerized system may, for example be a web based interface allowing uploading of sequence information of a patient from anywhere in the world, and in any suitable computer readable format for forming the first database, which is then compared with the second database to identify a match as disclosed herein. Based on the matches identified and in accordance with the disclosure herein an immunogenic composition may be prepared and that is specific for the patient. Such immunogenic composition may then be available to the patient within a short period of time, allowing early commencement of the therapeutic treatment.

[0135] Alternatively, the computerized software may be in the form a software that can be executed on a computer device.

[0136] Finally there is provided for an anti-CTLA agent, an anti-PD-1 agent, an anti-PD-L1 agent or a combination thereof for use in the treatment of cancer in a subject, wherein the treatment further comprises administering to the subject a subject-specific immunogenic composition comprising a therapeutic amount of a plurality of neoantigens identified with the method as disclosed herein, or DNA or RNA encoding such neoantigens, wherein the agent and the plurality of neoantigens, or DNA or RNA encoding such neoantigens are administered simultaneously or sequentially.

[0137] Preferences, particularities and considerations expressed herein in the context of any other embodiment likewise apply to the above embodiment.

[0138] Indeed, it will be understood that all details, embodiments and preferences discussed with respect to one aspect of embodiment of the invention is likewise applicable to any other aspect or embodiment of the invention and that there is therefore not need to detail all such details, embodiments and preferences for all aspect separately.

[0139] Having now generally described the invention, the same will be more readily understood through reference to the following examples which is provided by way of illustration and is not intended to be limiting of the present invention. Further aspects and embodiments will be apparent to those skilled in the art.

### EXAMPLES

[0140] The present invention is illustrated by using the data from patient number TCGA-14-0817-01A-01D-1492-08 from the Cancer Genome Atlas TCGA. [https://portal.gdc.cancer.gov/]. The patient has had resection of a glioblastoma, a brain tumor. This TCGA provided (standard) output of the genome sequence contains a list of somatic mutations, relative to the patient's germline sequence. We take the subset of provided FS (frame shift) mutations, and compared this against the databases of predicted novel open reading frame peptides (pNOPs) as disclosed herein. Here it was compared to the complete list of possible out of frame open reading frames (SEQ ID NO: 1-1989), thus to 1989 pNOPs as represented in the Sequence Listing. We find a match in pNOP number pNOP587802 this is in the in gene TP53 (a well-known tumor suppressor gene), encountered 7 times in the TCGA reference cohort, plus a match in pNOP number pNOP4985, hit 9 times in the reference cohort, in gene SSPO (a spondin encoding gene). The two pNOPs are both represented in the sequence libraries as described herein, including in the sub-library (SEQ. ID. NO. 1-960) that accommodates to 20% of all TCGA cancer patients, and containing in total 960 pNOPs. For these particular NOPs, vaccine peptides of 20 amino acid length are pre-synthesized, and can be distributed in freeze dried form, off the shelve.

[0141] The frameshift in the p53 gene generates a 21 amino acid NOP: RWSGPSSASYPSGRKFACGVFG (SEQ. ID. NO. 584), where the 20-mer peptide WSGPSSASYPSGRKFACGVFG (comprised in SEQ. ID. NO. 584) is represented as vaccine.

[0142] The mutation in SSPO occurs in a relatively upstream region within pNOP4985, the patient has 174 consecutive amino acids in the new frame:
[0143] GPGSGLPPTLRQPGGVPRVKVTGRNCRAATQCVGQRCSAGRPGLPGPPAPKAALP REGALAGAVVPDSAPALGIHPAQEMPPRRSPAAPLYAQCQASGVCGLPGPLAQPPV MEASRHVGAAAPAWLQGTPRAQDPTVRPGTATRSPAQPSAQRTCCSAQQSSVTRR GVLALGYA (SEQ. ID. NO. 333). Because the previous data had indicated that this pNOP occurs quite often (approximately 1 in a 1000 cancers), we had generated freeze dried peptides based on a tiling path: for this region we have 5 peptide vaccines, each shifted 10 amino acids compared to the previous one, thus in total covering the C-terminal 60 amino acids multiple times. Thus the vaccine contains these 5 peptides (here mentioned from C-terminus, to more upstream):

(all comprised in SEQ. ID. NO. 333)
CCSAQQSSVTRRGVLALGYA,
SPAQPSAQRTCCSAQQSSVT,
PTVRPGTATRSPAQPSAQRT,
WLQGTPRAQDPTVRPGTATR,
and
SRHVGAAAPAWLQGTPRAQD.

[0144] Next, a physician is informed within 24 hours after we received the genome sequence of the patient tumor that we can offer 6 peptides in freeze dried form for vaccination against two long antigens, plus their certificates of analysis according to GMP regulation, to arrive at the hospital pharmacy within 24 hours after order. These are completely personalized vaccines, based on the patient's tumor genome sequence. The amount of peptide shipped is sufficient for the initial weeks of vaccination steps, and more can be ordered.

[0145] Thus the time between submission of genome sequence and vaccination can in principle be as short as 24-48 hours (in practice possibly closer to a week). In other words for patients with tumors such as this patient (average life expectancy after diagnosis less than a year) no time is lost. In addition, since these are NOPs that are encountered more often, the costs of their synthesis, purification, sterilization and formulation has an enormous advantage in terms of scale compared to peptide vaccines that are synthesized de novo on a case by case basis, such that the costs for the patient/hospital/insurance can be much lower. Finally, where possible feedback is collected on treatment outcome, so that eventually we accumulate knowledge that one peptide happens to work (even) better than others, data which we can eventually make available. Note that with SNV-neoantigens (ever different) such a new body of outcome evidence will not be attainable.

[0146] Having now fully described this invention, it will be appreciated by those skilled in the art that the same can be performed within a wide range of equivalent parameters, concentrations, and conditions without departing from the spirit and scope of the invention and without undue experimentation.

[0147] All references cited herein, including journal articles or abstracts, published or corresponding patent applications, patents, or any other references, are entirely incorporated by reference herein, including all data, tables, figures, and text presented in the cited references. Additionally, the entire contents of the references cited within the references cited herein are also entirely incorporated by references.

[0148] Reference to known method steps, conventional methods steps, known methods or conventional methods is not in any way an admission that any aspect, description or embodiment of the present invention is disclosed, taught or suggested in the relevant art.

[0149] The foregoing description of the specific embodiments will so fully reveal the general nature of the invention that others can, by applying knowledge within the skill of the art (including the contents of the references cited herein), readily modify and/or adapt for various applications such specific embodiments, without undue experimentation, without departing from the general concept of the present invention. Therefore, such adaptations and modifications are intended to be within the meaning and range of equivalents of the disclosed embodiments, based on the teaching and guidance presented herein.

[0150] It is to be understood that the phraseology or terminology herein is for the purpose of description and not of limitation, such that the terminology or phraseology of the present specification is to be interpreted by the skilled artisan in light of the teachings and guidance presented herein, in combination with the knowledge of one of ordinary skill in the art.

The application's sequence listing, which the Patent Office published only in electronic form, follows.

SEQUENCE LISTING (1989 sequences)

SEQ ID NO: 1 - protein, 103 aa, Homo sapiens
TGGPSSPSSHWKTPVVIYWDGTALRCVFVPVLGETGAQRKRISARKGSLTTSCPQGALSEHCPTTPAPLPSQRRNHWMENISPFRTRPAFKKKIVKESMKMVL

SEQ ID NO: 2 - protein, 78 aa, Homo sapiens
CCPRTILNNGSLKTQVQMKLPECQRLLPPWPLHQQLLHRRPLHQPPPGPCHLLSLPRKPTRAATVSVWASCILGQPSL

SEQ ID NO: 3 - protein, 85 aa, Homo sapiens
SSQNARGCSPRGPCTSSSYTGGPCTSPLLAPVIFCPFPENLPGQLRFPSGLLAFWDSQVCDLHVLPCPQQDVLPTGQDLPCAAVG

SEQ ID NO: 4 - protein, 14 aa, Homo sapiens
VLPTGQDLPCAAVG

SEQ ID NO: 5 - protein, 46 aa, Homo sapiens
LARTPLPSTRCFANWPRPALCSCGLIPHPRPAPASAPWPSTSSHST

SEQ ID NO: 6 - protein, 36 aa, Homo sapiens
CFANWPRPALCSCGLIPHPRPAPASAPWPSTSSHST

SEQ ID NO: 7 - protein, 72 aa, Homo sapiens
GAAPTMSAAQIAMVWPLLSILSEWKEICVWSIWMTETLFDIVWWCPMSRLRLALTVPPSTTTTCVTVPAWAA

SEQ ID NO: 8 - protein, 113 aa, Homo sapiens
PGRPLQTHVLPEPHLALQPLQPHADHAHADAPAIQPVLWTTPPLQHGHRHGLEPCSMLTGPPARVPAVPFDLHFCRSSIMKPKRDGYMFLKAESKIMFATLQRSSLWCLCSNH

SEQ ID NO: 9 - protein, 91 aa, Homo sapiens
WAAPEWRSCCCSTARSPTAPTPPLSPDPCTTLPGRASWTRWWCCTGPGRGWTCAMPGAVCPWTWLRSWAIAMSHGTCARLRGAPEAVTMPA

SEQ ID NO: 10 - protein, 139 aa, Homo sapiens
FILERNPTNVKNVAKLSTGHQTLWNIRKFTLERHPTNVKNVTKPSAGPQALLNIRQLMLEKNPTNVKNVAKPSAGPQDLLNIRQLMLERNPTNVKNVAKLSTGPQTLWNIREFILERNPTNVKNVAKALVRSQSLLNIR

SEQ ID NO: 11 - protein, 60 aa, Homo sapiens
EDIRGYTLERNPTNVKNVAKLLAILQPLLNIREFILERNPTNVKNVAKLLAIPQPLLIIR

SEQ ID NO: 12 - protein, 60 aa, Homo sapiens
LDIRGYTLERSPTNVKNVAKLLAVPQPLLSIRQFILERNPTNVKNVAKLLSTPQPLLNIK

SEQ ID NO: 13 - protein, 60 aa, Homo sapiens
LNIKDFILQRIPTNVKIVAKPSTGSQPLLHTGEFILERNPTNVKNVGKHLTGPHTLLHIR

SEQ ID NO: 14 - protein, 60 aa, Homo sapiens
LNIKEFILGKILTNVKNVVKSLTGSQPLLDTEEFILERNPTNVNNVAKLLSSPQPLLHIR

SEQ ID NO: 15 - protein, 251 aa, Homo sapiens
FIQERNPTNVKNVAKPLTSSQILLHIKKFILESNPTYVKNVARLLPNPQPLLHIREFILEKNPTNVKNVEKLLTDPQNLLNIKTFILESNPTNVRNAAKLLTDPQILRNIGKFIPKRNPTNVKNVAKLLNTPQPLLHIREFTLERNPTNVKNVAKLLTDPQNLLNIRNFILERNPTNVKNVAKLLSNPQNLLNIRKFILERYPTSVKNVAKLLNTPHPLLHIKEFILGRNPTNVKNVAKLLADPQNLLNIR

SEQ ID NO: 16 - protein, 55 aa, Homo sapiens
FIAERNPTNVKNVAKPLSTPLSLLHIKEFILERNPTNVKNVAEPLSTSHPLLHTR

SEQ ID NO: 17 - protein, 55 aa, Homo sapiens
FILEKNLTNVKNVAKALIGPQPLLNIKEFILERNPTNVKCVAKPLMSPQTLLHIR

SEQ ID NO: 18 - protein, 55 aa, Homo sapiens
FILERNPTNVKIVAKPLTRPEFLLNIRTFILKRNPMSVKNMAKPSTSPQFLPDIR

SEQ ID NO: 19 - protein, 55 aa, Homo sapiens
FILERNPTNVKNVAKLSTGPQTLWNIREFILERNPTNVKNVAKALVHSQSLLNIR

SEQ ID NO: 20 - protein, 55 aa, Homo sapiens
FILERNPTNVKNVAKPINGPQPLVIIRKFILERNPTNVKNVAKVLVCSPSLLNMR

SEQ ID NO: 21 - protein, 55 aa, Homo sapiens
FILERNPTNVKNVVKLLTDLQPLLPIEKFILERNLTNVKNVAKPLSSPQTLLHIR

SEQ ID NO: 22 - protein, 55 aa, Homo sapiens
FILERNSTNVKNVAKALIGPRPLLNIKEFILERNPTNVNNVAKLLMSPQTLLHIR

SEQ ID NO: 23 - protein, 55 aa, Homo sapiens
FILERNSTNVKNVAKPISGPQPLDITRKFILERNPTNVKNVAKPLVRSQSSLNIR

SEQ ID NO: 24 - protein, 55 aa, Homo sapiens
FILKRNSTNVKNLARPLNSPHTVLYIKLFILERNPTNVKNMAKFLTSPQTLLHKR

SEQ ID NO: 25 - protein, 55 aa, Homo sapiens
FIVERNPTNVKNVAKPSTGPHTLLHIREFILERNPTNVKNVAKPLSTPLPLLHIR

SEQ ID NO: 26 - protein, 55 aa, Homo sapiens
MNIKKFILERNPTNVKNVAKPLDGPQIGVNIRKFIVQINPTNVKNVTKPLNNFRS

SEQ ID NO: 27 - protein, 50 aa, Homo sapiens
FILERNPTNVKNVAKLLTNLQTLLNIRKFILQRNPINVKNVAKLLTNTQT

SEQ ID NO: 28 - protein, 116 aa, Homo sapiens
LNIRKFILERIPTDVKNLAMPLISPQPLLTIREFMLVRNTTDVKNVAKHLTTTQPLLTIREFILERNPTNVKNVAKPLAGTQPLLPIREFILERSPTNVMNVAKPLAYPQPLLNIR

SEQ ID NO: 29 - protein, 116 aa, Homo sapiens
LTIGKFILERNHTNVKNVEKLLIDPQPLLDIRKFILERNPTNVKNVTELLASLQTLLNIRKFILERNPINVRNVAKLLTDSQPLLNIREFILEKNPINVKNVEKPLINPINLLDIR

SEQ ID NO: 30 - protein, 44 aa, Homo sapiens
FILERNPTNVEIMAELSTYPQILLHIRKFILERNPTNVSMAKLN

SEQ ID NO: 31 - protein, 111 aa, Homo sapiens
FILERNPTNVKNAAKPISGPQPLVIIRKFILERNPTNVKNVAKVLVCSQSLLNMRSFILERNPTNVKNVAKLSTGPQTLWNIRKFTLERHPTNVKNVAKALVCSQSLLNIR

SEQ ID NO: 32 - protein, 111 aa, Homo sapiens
FILERNPTNVKNVAKPSAGYQSSVNIRKFILERNSRNVKNVAKPISGPQPLVIIRKFILERNPTNVKNVVRLSTGPQTLWNIREFILERHPTNVKNVVKALVCSQSLLNIR

SEQ ID NO: 33 - protein, 111 aa, Homo sapiens
FIPERNVMNVKNAAKLLTDPQNLLNISTFILERSCTNVKNVVKPLTSPQPLLHIREFIVERSPTNVKNVAKLLNNFQILLTIKKFILERNPTNVRNVAKLLTNSQTLLDIR

SEQ ID NO: 34 - protein, 111 aa, Homo sapiens
SILDSNPSSVKNVARPLSASLSLLHIREFILERNPTNVKNVAKPSTRPHTLLHIREFILERNPTNVNDVARLLSAPLSLLDIREFILERNPTNVKNVAKALSAPLPLLHIR

SEQ ID NO: 35 - protein, 106 aa, Homo sapiens
FILEKNPINVKNVAKPLIGSQPLLNIREFMLERNPSHVKNVGKSLPHPQTLPNISEFILERNPTNVKNVAKPLIGPQPLLNIREFILERNPTHVKNVAKLLDSPQN

SEQ ID NO: 36 - protein, 100 aa, Homo sapiens
YVAKLLNGPQPLLHIRKFILERNLTDVKNVAKLLTNLQTLLHIREFIPERNPTDVKNVAKPLSSPQTLLHIRKFILERNPTNVKNVAKPSTDPQTLLHIR

SEQ ID NO: 37 - protein, 31 aa, Homo sapiens
FILERNPTNVKNVAKPISGPQPLVIIRKFIL

SEQ ID NO: 38 - protein, 321 aa, Homo sapiens
FILERSPTNVKNVAKLLTSLQDLLDIKKFILERNPTNLKNVAEFLPVPQHLLKTRKFILERNPTIVKNVAKFLPIPLHLLDIREFILKRNPINVTNVAKLLTGPHTLLAIGEFILERNPTNVKNVAKPLSSPQTLTVIKKFIVERNPTNVKNVAKLLSCPQDLLNIRKFILERNLTNVKNVAKLLTGPQDLLNIRKFILERNPTNVNNVTKLLPTPQTLVVIRKFIVERNPTNVKNVAKLLIGPQDLLNIRKFILERNLTNVKNVPKLLPGLQDLLNIRKFIGWVWWLMPVIPALWEAEVGGSRGQEIETVLANMVKPRLY

SEQ ID NO: 39 - protein, 27 aa, Homo sapiens
FILERNPTNVENVAKPLTSPQPLIHIR

SEQ ID NO: 40 - protein, 27 aa, Homo sapiens
FILERNPTNVKNVAKLLGNLQLLLNIR

SEQ ID NO: 41 - protein, 27 aa, Homo sapiens
FILERNPTNVKNVAKLLTGPHNLLHIR

SEQ ID NO: 42 - protein, 27 aa, Homo sapiens
FILERNPTNVKNVAKLLTNSQTLLNIR

SEQ ID NO: 43 - protein, 27 aa, Homo sapiens
FILERNPTNVKNVAKPLTGPQNLLHIR

SEQ ID NO: 44 - protein, 27 aa, Homo sapiens
FILERNPTNVKNVAKPLTSPQPLLHIR

SEQ ID NO: 45 - protein, 27 aa, Homo sapiens
FILERNPTNVKNVARLLTNLQSLLNIR

SEQ ID NO: 46 - protein, 27 aa, Homo sapiens
FILERNPTNVKNVARPLSAPLSLLRIR

SEQ ID NO: 47 - protein, 27 aa, Homo sapiens
FILERNPTNVKNVEKPLIISHTLLHIR

SEQ ID NO: 48 - protein, 27 aa, Homo sapiens
FILERNPTNVKNVEKPLTSLHTLPHMR

SEQ ID NO: 49 - protein, 27 aa, Homo sapiens
FILERNPTNVRNVAKLLTDPQPLLNIR

SEQ ID NO: 50 - protein, 88 aa, Homo sapiens
LDIRGYTLERNPTNVKNVAKLLAILQPLLNIREFILERNPTNVKNVAKLLAVLQPLLNIREFILERNPTNVKNVAKLLAIPQPLLIIR

SEQ ID NO: 51 - protein, 27 aa, Homo sapiens
INIRKFILERNPTNVKNVANLWMIHKP

SEQ ID NO: 52 - protein, 27 aa, Homo sapiens
MDIREFILERNPTNVKNVAKHLANLQP

SEQ ID NO: 53 - protein, 83 aa, Homo sapiens
FILERNPTDVKNVAKPLTGPHTLLHIKEFILERNPTDVKNVAELLTGPHTLLHIRLFILERNPTNVKNVAKLLTNPQPLLHIR

SEQ ID NO: 54 - protein, 83 aa, Homo sapiens
FILERNPTNVKNVAKPLVRSRLLLHIRQFMLERSPTNVKNVAKPSVRSQPLLHIRQFMLERSPTNVKNVAKPLVSSQSLLNIR

SEQ ID NO: 55 - protein, 83 aa, Homo sapiens
FILERNPTNVKNVAKPSAGCQSLVNIRKLMLERNSTNVKHVAKPISHPQPLVIIRKFILKRNLTNMKNVAKALVHSQSLLNIR

SEQ ID NO: 56 - protein, 83 aa, Homo sapiens
FILERSYTNVMNVTKLLTNLQPFLHIKEFILERNPTNVKNVAELLIDHQTLLNIRKFILERNPTNVKNVEKLLTSSQLLLHIK

SEQ ID NO: 57 - protein, 83 aa, Homo sapiens
LMLERNLTNVKNVAKLFTDSHTLLNIRQVILERNSTNVKNAAKALTGPQPSLNIREFILERNPTNVKNVAKLLMSPQTLLPIR

SEQ ID NO: 58 - protein, 83 aa, Homo sapiens
SILERIPTNVENLAKFSTYPQNLVHVRKFILERNSTNVKNVAKPLTDLQPLLDIREFILERNPTNVKNVAKLLTNLQHLLHIR

SEQ ID NO: 59 - protein, 22 aa, Homo sapiens
FILERNPTNVKNVAKHLANPQP

SEQ ID NO: 60 - protein, 22 aa, Homo sapiens
FILERNPTNVKNVEKLITDSQT

SEQ ID NO: 61 - protein, 22 aa, Homo sapiens
FILERNPTNVTNVAKPLTGPHN

SEQ ID NO: 62 - protein, 78 aa, Homo sapiens
ISTNVKNVEKPLTGPQPLLNIREFIRERNLTNVKNVVKPLTSPQTLLNIRKFILERNPTNVKNVAKLLTDSQLLLPIR

SEQ ID NO: 63 - protein, 162 aa, Homo sapiens
FILERNPTNVKNVAKPLSTPHTLPHIRKFILEGNPTTVKNVANPLSTALTLLYIREFIQERNPTNVKNVAKPFTYPHTLLHIRYFILERNPTDVENVAKLLTIPQPFFHMRKFILERNPTNVMNVAKPLPGPQSSPNIKELILERNPTNVKNVANPLLHPQL

SEQ ID NO: 64 - protein, 279 aa, Homo sapiens
SIRKCILERNLMNALNVVKCALESHLLLYTLEVTQERRHINVINVEKPSARRKTSFLIRNITLERNLMNVKKFLFRCQPSSDTRKIIQEPNPMHVRNVAKPLTAKHISLSMRKFILEKNHLNVISVEEPSARSNTSLNIRTSILERSPLNVVSVEKLLARRKTSLYIRESILERNLMNVKGVGKLSFRSQASLDTREVTQERNLIRVRNVGKPSVASQISQSMRKFILERNPTNVMNVEQSSGRSNTSLNITIFIQERNPMNVINVEKPSLESHHLLYM

SEQ ID NO: 65 - protein, 71 aa, Homo sapiens
FIMERNPTNVKNVIRQLMLERNPTNVKNVAKLSTGPQTLWNIREFILERNPTNVKNVAKASVHSQSLLNIR

SEQ ID NO: 66 - protein, 33 aa, Homo sapiens
MLQFRGSRFFQMLILYYILPRKVLQMDFLVHPA

SEQ ID NO: 67 - protein, 90 aa, Homo sapiens
TNQALPKIEVICRGTPRCPSTVPPSPAQPYLRVSLPEDRYTQAWAPTSRTPWGAMVPRGVSMAHKVATPGSQTIMPCPMPTTPVQAWLEA

SEQ ID NO: 68 - protein, 347 aa, Homo sapiens
RERRSQPAPPAPAAAAEGGRRLPDQLHALQDRAVPALRGERHVQVRRKVPVRAWLPRAAQPDSPSEVQDRAVPHLSYHRLLPLWAALPLHPQRGRAAARAVGGRLRGPACLWHARCVAPGLPAGAAAQVAPQPQLLGLPVGPPSAPGRPRVAAAARQPHVAHAAAALLLFGLVLLLLRLLLFLGLRGLHALGRPDMLRLRGGRGCGRSAVRHRGRRGPAGAGGPVRGLLVGLVRQQRLRLRSGAQQPHHAARHPDPQLCRRGRRRLLPQSAAAAAAGPGAPRAAAGAAQRDPPRRGRRTSLAALQLPAAAPPVRLARVRRAPQPPGLAVGPRQLPKRLPELRQPQRL

SEQ ID NO: 69 - protein, 48 aa, Homo sapiens
AQAKAVCSQESRDVLCELSDHHNHTLEEECQWGPCLQCLWALLQASQY

SEQ ID NO: 70 - protein, 494 aa, Homo sapiens
TRRCHCCPHLRSHPCPHHLRNHPRPHHLRHHACHHHLRNCPHPHFLRHCTCPGRWRNRPSLRRLRSLLCLPHLNHHLFLHWRSRPCLHRKSHPHLLHLRRLYPHHLKHRPCPHHLKNLLCPRHLRNCPLPRHLKHLACLHHLRSHPCPLHLKSHPCLHHRRHLVCSHHLKSLLCPLHLRSLPFPHHLRHHACPHHLRTRLCPHHLKNHLCPPHLRYRAYPPCLWCHACLHRLRNLPCPHRLRSLPRPLHLRLHASPHHLRTPPHPHHLRTHLLPHHRRTRSCPCRWRSHPCCHYLRSRNSAPGPRGRTCHPGLRSRTCPPGLRSHTYLRRLRSHTCPPSLRSHAYALCLRSHTCPPRLRDHICPLSLRNCTCPPRLRSRTCLLCLRSHACPPNLRNHTCPPSLRSHACPPGLRNRICPLSLRSHPCPLGLKSPLRSQANALHLRSCPCSLPLGNHPYLPCLESQPCLSLGNHLCPLCPRSCRCPHLGSHPCRLS

SEQ ID NO: 71 - protein, 185 aa, Homo sapiens
PCRAGRRVPWAASLIHSRFLLMDNKAPAGMVNRARLHITTSKVLTLSSSSHPTPSNHRPRPLMPNLRISSSHSLNHHSSSPLSLHTPSSHPSLHISSPRLHTPPSSRRHSSTPRASPPTHSHRLSLLTSSSNLSSQHPRRSPSRLRILSPSLSSPSKLPIPSSASLHRRSYLKIHLGLRHPQPPQ

SEQ ID NO: 72 - protein, 139 aa, Homo sapiens
FALERNSTNVKNVPKLLTNPQTLLNIRKFILERNLTNVKNVAKPLTGPQLLLNIREFILERNPTHVKNVAKPLTSSQTLLHIRESILQRNSINVQNVVKLLAGPQTLLNIRKFILKRNPTNVKNVAKLLSGPQSLLNIS

SEQ ID NO: 73 - protein, 55 aa, Homo sapiens
FILKRNPTNVKNVAKPLTGPQPLLAIREYILVRNPTNVKNVAKPLTGLQLLLNIR

SEQ ID NO: 74 - protein, 55 aa, Homo sapiens
FTLEKNPTNVKNVAKLLIGPHTLLHIREFILDTNPTNVKNVANPLVYSQPLLNTR

SEQ ID NO: 75 - protein, 55 aa, Homo sapiens
FTLKRNPTDVKNIAKLIRSPHTLLHIKEFILERNPTNVKNVAKPLVFSQPLLNIR

SEQ ID NO: 76 - protein, 55 aa, Homo sapiens
FTLKRNPTDVKNVAKLIRSLHTLLHIKEFILERNPTNVKNVAKPLVYSQFLLNIK

SEQ ID NO: 77 - protein, 55 aa, Homo sapiens
LILERNPTNVKNVAKPFTSPQLLLNIKKFILEGTPVTVKNMAKPLINSQFLTDIR

SEQ ID NO: 78 - protein, 55 aa, Homo sapiens
LILERNPTNVKNVAKSLSTSLALLHIRKFIVERNPTFVKNVAKPLCTPIPLLHIR

SEQ ID NO: 79 - protein, 124 aa, Homo sapiens
FILERNPTNVKNVAKLLNCPQPFLHIRLFILERNPTNVKNVAKLLTDPQTLLNIRKFILESNPTNVKNVAKHLTIPHTLIHIREFILKSNPTNVKNVAKLSTNIQTLLHITKFILERNSTNLKM

SEQ ID NO: 80 - protein, 50 aa, Homo sapiens
FILERNHTNVKNVAKPLHGLQASINIGELILERNPTNVKNVAKRILHPQI

SEQ ID NO: 81 - protein, 111 aa, Homo sapiens
LILERNPTNVKNVAKLLTISQSLPNIRGFILERNPTSVKNVAKLLPNPQTLLHIRKFILERNSTNVKNVAKLLPNLQTLLHIKKFILEENPTNVKNVAKLLTSSQLLLNIR

SEQ ID NO: 82 - protein, 111 aa, Homo sapiens
LILERNPTNVKNVAKPLTGPQPLLNITEFILERNPTNVKYVAKPLTSSQTLLHIREFILQKNRTNVKNVAKLLAGPQTLLNIRKFTLKRNPTNVKNVAKLLSGPQSLLNIR

SEQ ID NO: 83 - protein, 107 aa, Homo sapiens
RNPTNVKNVAKLLTNLQFLLNIREFILVRNPTNVKNVAKPLVRSQPLLHIRQFMLERSPTNVKNVAKPLLRSQPLLHIRQFMLERSPTNVKNVAKPLVSSQSLLNIR

SEQ ID NO: 84 - protein, 34 aa, Homo sapiens
FTLERNPTNVKNVAKPLTSLQSLLTIRKFILSHL

SEQ ID NO: 85 - protein, 27 aa, Homo sapiens
FILEKNPTNVKNVAKLLNDLQPLLYIK

SEQ ID NO: 86 - protein, 27 aa, Homo sapiens
FILKRNPTNVKNVAKLLTNLQPLVYIK

SEQ ID NO: 87 - protein, 27 aa, Homo sapiens
FILKRNPTNVKNVAKLSTDSQTLIRIR

SEQ ID NO: 88 - protein, 27 aa, Homo sapiens
FIQKRNPTNVKNVAKLLNDLQPLLNIG

SEQ ID NO: 89 - protein, 27 aa, Homo sapiens
FIVERNPTNVKNVAKLLSNSQPLLHIK

SEQ ID NO: 90 - protein, 27 aa, Homo sapiens
FMLERNPTNVKNVAKLLTNFQTLLNIR

SEQ ID NO: 91 - protein, 27 aa, Homo sapiens
FTLRRNPTNVKNVAKPLSGPQPLLNIR

SEQ ID NO: 92 - protein, 27 aa, Homo sapiens
LMLERNPTNVKNVAKISIDSHTLLNIR

SEQ ID NO: 93 - protein, 83 aa, Homo sapiens
DILERNASNVKNVSSHFASVYTKPNINAFILQRSPVNVKNVKKPFIGPQPLLIIRKFILKINPTNVKNVAKLLSSSQPLLHIK

SEQ ID NO: 94 - protein, 83 aa, Homo sapiens
FILIRNPTNVKNVAKLLTDLQSLVYIRKFILEKNPTNVKNVAKLLSGPHTSLGTSKFIVYKNPTNVKNVAKPLVYSQPLLNIR

SEQ ID NO: 95 - protein, 83 aa, Homo sapiens
FILKRNLPRVKNVTKHLSGPQPLLNIREFIPERKPTNVKNVAKHLASLHTLLHIRGCTLERNPTNVKNVAKLLANPQPLLHIR

SEQ ID NO: 96 - protein, 83 aa, Homo sapiens
SILESNPTNVKNVTKLLTILQLFLHIRKFILERNRTRVINVAKPLFHPRSLVNMRRFIRERNPTNVKNVAKPSPAPHTLLCIR

SEQ ID NO: 97 - protein, 23 aa, Homo sapiens
RNPTNVKNVAKALLCSQSLQNIR

SEQ ID NO: 98 - protein, 79 aa, Homo sapiens
RNPTNVKNVAKLLTDLQSLLNIREFILMRNPTNVKNVAKPLVRSQPLLHIRQFMLEKSPTNVKNVAKPLVSSQSLLNIR

SEQ ID NO: 99 - protein, 27 aa, Homo sapiens
FIVERNPTNVKNVARPLSAPLTLLHIR

SEQ ID NO: 100 - protein, 91 aa, Homo sapiens
TRASPPRSSSAIAVRASCCPYGSTSTASRSPTQRCRLARAAASTATEVTFGSSEMQGHTMGFWLTKLNYLCHLSMLTDSLFLPISHCQCIL

SEQ ID NO: 101 - protein, 117 aa, Homo sapiens
IQIDITQNILERNLSNVKNVANHFACFYTYVSIKEFILERILTDVKNVAKPLSGFQPLLDTGEFILERNPTNMNVANLLTRTQTLLHIREFILDRNPTNVKNVAHLSTNSHTLLGIS

SEQ ID NO: 102 - protein, 222 aa, Homo sapiens
PILAATGTSVRTAARTWVPRAAIRVPDPAAVPDDHAGPGAECHGRPLLYTADSSLWTTRPQRVWSTGPDSILQPAKSSPSAAAATLLPATTVPDPSCPTFVSAAATVSTTTAPVLSASILPAAIPASTSAVPGSIPLPAVDDTAAPPEPAPLLTATGSVSLPAAATSAASTLDALPAGCVSSAPVSAVPANCLFPAALPSTAGAISRFIWVSGILSPLNDLQ

SEQ ID NO: 103 - protein, 53 aa, Homo sapiens
APVIFQIALDKPCHQAEVKHLHHLLKQLKPSEKYLKIKHLLLKRERVDLSKLQ

SEQ ID NO: 104 - protein, 31 aa, Homo sapiens
FHTPARHPRPRHGHLQAVTAHDGGCEALPPP

SEQ ID NO: 105 - protein, 19 aa, Homo sapiens
GHLQAVTAHDGGCEALPPP

SEQ ID NO: 106 - protein, 53 aa, Homo sapiens
SWKGTNWCNDMCIFITSGQIFKGTRGPRFLWGSKDQRQKGSNYSQSEALCVLL

SEQ ID NO: 107 - protein, 158 aa, Homo sapiens
TTCWTRRRWGRLWPPPPARASRRDSSDGTRPATCMHSPTPRPAPAAARPSSRAPLTAAAAAARRPAVRPPTAPLRSRRGAAAQPCSTRRTNSGTARLARTAIAASTSCTCSSSRRGAAAPRSTPRATRPSCAGPSRRAARASTAKSASSRMASTSCAA

SEQ ID NO: 108 - protein, 154 aa, Homo sapiens
DLLTKKSLRKKRRKSPITRNLRHWPCLKDHKWAVRLGLICRNPGLLWACMVKLQEYQHLLIKTSLRKKRKSPITRNLRQWPCLRASRVHTLKDHRWAVRLGLWKAVQLLKGSRNPTVQRRSLRKGSLRLSKGHECLVMIFQCPVRTLRAHSLIQ

SEQ ID NO: 109 - protein, 140 aa, Homo sapiens
SSSVSFLSSYLPSPAWHPRPFPVPCWLSRQCCSVSLRTTLACCSARQPDATSATQWPVGQHHASFHEPIKHCPRSRLYAEEPPDAPVQFPPARLSLISASAFRRTDTHRHGLLPAELHGELWSPGGSVWPTRWLPQAAKL

SEQ ID NO: 110 - protein, 134 aa, Homo sapiens
FILEQNLTNVKNVAVPLGHSQPLLNIREFILERNLTNAMNVVKPLTGPQLLLNIREFILERSPTNVKNVAKLLTGPQTLLDIRKFILERNHTNLKDVTVLLTTPQTFLDIKEIIWVRNPRNVKNVTKPLSGCHT

SEQ ID NO: 111 - protein, 55 aa, Homo sapiens
FILERNPTNAMNVVKPLTGPQLLLNIREFILERNPTNVKNVAKLLTSPQPLLDIR

SEQ ID NO: 112 - protein, 32 aa, Homo sapiens
LDIRGCTLERNHTNVKNVAKLLIDPQSLLHIR

SEQ ID NO: 113 - protein, 32 aa, Homo sapiens
LDIRGYTLERSPTNVKNVAKLLGNPQPLLNIR

SEQ ID NO: 114 - protein, 91 aa, Homo sapiens
FILERNSTNVKNVAKLLTYPQTLLHIRKIVLERNPTNVKNVAKLTYHQPLLHIRQFIFERNPANVKNVAMLVTKSQTLLNIRKLILETLQT

SEQ ID NO: 115 - protein, 27 aa, Homo sapiens
FIKEINYTNVKNVAKLLTNPHPLVNIR

SEQ ID NO: 116 - protein, 27 aa, Homo sapiens
FMLERNSTNVKNVAKLLIIPQVFLHIR

SEQ ID NO: 117 - protein, 83 aa, Homo sapiens
FILERNHTNVKNVAKLLTNPQNLPNIRKFILERNPTHVKNVAKPLTSPQTLLNIREFILEKNLTNVKNVTKLLNGPQSLLNIR

SEQ ID NO: 118 - protein, 78 aa, Homo sapiens
ISANVKNVEKLLTALQSSLNIRELILERNPTHVKNVAKSLIGPHALLHIKKIILDTNSTNVKNVAKLLTSPQSLLPIR

SEQ ID NO: 119 - protein, 78 aa, Homo sapiens
YMLERNSTNVKNVAKLLIDLQILLYISLFILERNLTSVKNVAKHLTGPQALLNIKDFILERNPSNVKNVAKHLYGLQP

SEQ ID NO: 120 - protein, 78 aa, Homo sapiens
YMLERNSTNVKNVAKLLIDLQILLYISLFILERNLTSVKNVAKHLTGPQALLNIKEFILERNPSNVKNVAKHLYGLQP

SEQ ID NO: 121 - protein, 179 aa, Homo sapiens
ALGPHSRISCLPTQTRGCILLAATPRSSSSSSSNDMIPMAISSPPKAPLLAAPSPASRLQCINSNSRITSGQWMAHMALLPSGTKGRCTACHTALGRGSLSSSSCPQPSPSLPASNKLPSLPLSKMYTTSMAMPILPLPQLLLSADQQAAPRTNFHSSLAETVSLHPLAPMPSKTCHHK

SEQ ID NO: 122 - protein, 340 aa, Homo sapiens
RSVAARVASRTSPTATLGRAWSRGNGTTQHERRRRRMAPIRKGRRRQNQKDTKRNPVTRTKVRNQSWKNVRRTKNLINVLKRKKIPRKNIKTHMAKTKKGKRLSTKGKRRRRRLSLGSSQKTSLKKKMTRKAKRKAGTSQTSSQMRVRTTETAAWGAGSRWERPATCRGRTASRRRRKDGRPMPPTDTGSLLTSSTLRGRRTRSPETGERTEGLPTRGETKKRKSLKSTRRRRIKSPQKSTRTGRTEPQWTPRKIRKINRSSPRRLKRSTLPKTRLKANTKRSRTKNIPRRGSPREVPTRKKACLKSWKKRLSMSTEKTPTIKSARSPLTASRTEGRSRG

SEQ ID NO: 123 - protein, 69 aa, Homo sapiens
KKKGKGLTHPVPLKRTLQNKRNKNIRRKKRKKKKRVNQKKGNITKRKKRREKRKSILLHLIVLNSPESN

SEQ ID NO: 124 - protein, 33 aa, Homo sapiens
TRPYPAEKDERPILDVVDSKRCSAKEVERVVGQ

SEQ ID NO: 125 - protein, 73 aa, Homo sapiens
APMTSWAHLPCPMAPITLLPSPARSWQASLPLAWGCPGVAPRPPSSSGPCPSPLTCLTLPPALRILSRTRRAT

SEQ ID NO: 126 - protein, 150 aa, Homo sapiens
KFRSPEPWSSRRPPHPHPHPHPCSLVPVPSPLPLPHHPPCPVWGLRPSQQHPRPHPCQAWGPWPPQHLLYHHPCQAPVSSCPHHLHHSRAWDARPHPHPCCLVWAGALLHPHLHYCPAPAAPPWREAWRRSSWPRWTMAWAQHGSPAIGG

SEQ ID NO: 127 - protein, 97 aa, Homo sapiens
IQWGTTTAPRPIRPPFLESKQNCSHFPTPLLASEDRRETGLFLPSAAQKMKKAHFLKTWFRSNPTKTKKARFSTASLAKELTHPLLVSLLLKEKQDG

SEQ ID NO: 128 - protein, 131 aa, Homo sapiens
WGCPQAPYCSSTSNTSRVCRRQFSSSSSGNYSSSSSKKCSSSSPKQAKPQSPPGLLPQTKTLPKNPPNQKNRKTPPVRCPPSCRNSLKSQKQKAKVRTPSTTPSLFQRCSTSWSAASARRASATRRQRGAT

SEQ ID NO: 129 - protein, 84 aa, Homo sapiens
GGWDWAPRCPRRLPMSFSRRGGSAHTSRSVLSVPAGILPSSRGMGRRPRPRRAWKHSPLLRPRGGAWKSIFRLYSRAVLVERGP

SEQ ID NO: 130 - protein, 28 aa, Homo sapiens
VRKHFQTYGNYFLKTTFCPPCRPKQWMI

SEQ ID NO: 131 - protein, 47 aa, Homo sapiens
PTPGVPWMAVLMPRCSGLPGRPPRHPLQSLHHPPCSLSAATQAIPPR

SEQ ID NO: 132 - protein, 40 aa, Homo sapiens
ASTAQQHQLLSPAKEETTGWRIFHPSGPDQLSKRKLLKRA

SEQ ID NO: 133 - protein, 138 aa, Homo sapiens
CTVGMDLINVSFVGKHSIVSVYILSMKELTLERNRMNVNNVVNLLVILLPIEYMKELTLEKSLMNVRNVGKHSIVPDPVTDMKGVTWERRLINVRNVEKHSCVPVMFVDMKGPTLGKNFMNVSSVGKHYPLLQVFKHT

SEQ ID NO: 134 - protein, 51 aa, Homo sapiens
YNVEVDLIYVSCVGKPFFGLVYFVCMKELTLERNRMNVSSVVKPSLFTVPI

SEQ ID NO: 135 - protein, 299 aa, Homo sapiens
EIILKRNLLNVISVGNPSAGARILLHIRELTQGRNLMNVVNVENPSAGARTLFPIRELILERNLTGVINVGNPLARVMSLLCIKELILGRSLMNAISVESHSGRAINLLHIKEHIPERSPMNVINVGNHLSRAINLLHIKEFILGKNPMNAISVGNPLVKVINLLLIRELTQEKNPLNVISVGNPSAGALSLLHIKELTLERNRMNVVNVENLLTAVLTLLCIREFTLGKNRMNVISVGNPSARVMFLLYIRELILEKSPMNAVNVGSPSDRVHALLNIRELILERNHLNVISVEKHLA

SEQ ID NO: 136 - protein, 79 aa, Homo sapiens
CKVEIDLINVSCVGKLFFGPVYYVCMKELTLERNRMNVSSVLKPFLFTVPIEDMRECTLGRNRMNVSSVLKPCLIPVPI

SEQ ID NO: 137 - protein, 432 aa, Homo sapiens
TIVCTLLNIRSFLPKRNPINGKNVARSLTLTVVYTLLNSSKLILEKTFTNVKHVANLLLVPPILLCIREFTLERNHTNVKNVAKPFAVVHTLLNISEFILERNLINVKNVEKLLTVVHALLNIRQLIQEKNFTNVKYVANLMLVLQILLCIREFILERSLINVKNVAKSLAVVLALLNIGKFILEKIFTNAKYVLNLLLVSQILLCMREFILERNPINVKNVAKPFLIVHTLFDIIEFILEKNHTNVKHVANLLVTPQVLLCIGELILERNPIHVKNVAKPLVIVQMLFSIGEFILARDPTNVKNVAKPSTIGHTSLHIREVILERDPTNVKNVAKPSTLGHTSLHIGEDILERDPTNVMNVVKPSAIGHTSLHIGEVIVERDPTNVKNVAKPLTLGHTSLHIREVILEKNFKNVKHGADFLLVTHVLLCIR

SEQ ID NO: 138 - protein, 101 aa, Homo sapiens
RSLHHPQLPWWITWLHPTLLKMTSEPPKWGLQPLHSLAVLCPSEASVCRGAWRARYPQATALEVEGAPSHSVDSHPPSLPILWALLSTCPPRVLATHPQAT

SEQ ID NO: 139 - protein, 116 aa, Homo sapiens
SWKPQKTPSSPTPLWSIPNPGITHPRTRDSSPTWTQGPCLPDGKASSPAGTPPEKACGHPPTDRAETLLKFLLKGILALAIGPAGALAGPVLTTLGTQRPLPWAAPCPATASPSPL

SEQ ID NO: 140 - protein, 217 aa, Homo sapiens
RRRTTARSRASSSGCAWRTRGAGGAHGTTRPSSSCSSWAGTRPRRWHRRWWLWAWSVKPITSQWPVQYVNGLLPSSESVRSCVKQGNWRHSHQSQDLHQQLCPWPPVPPVSSPLSLRSQRQTSTSPSFSATPATHLPLRIARLMATSAPPASWMPQTLPFSPLGGCHPAWLSPISACPRLLPYPFHVLALEVTFPPGTAMPQMQLQALAMWEKGWDK

SEQ ID NO: 141 - protein, 258 aa, Homo sapiens
CRRRCLPRNRCSRSCRPRSCRPCSSSSKPSCSSSYRSTTRSSRSSSTCSSSPSSRLGNRSPKRHWGTSSWPSSSSSCKCNSCSSSTCSTCRGRGWSACSPTKPRGPSRPFRKQLFAQQTCPSCGRARVPPGSLPRTASSRRGWTSLARPPPLPRLPLPPRSHPPSPTIPCPTDSLLCSHLGETALPTRRPPAPTPCTDTESASGQAVRPCVKTWASLSNTSTQSTPWMTGVQPSAGYRCRWCSSWRSSSPRRASGCRP

SEQ ID NO: 142 - protein, 257 aa, Homo sapiens
CRRRCLPRNRCSRSCRPRSCRPCSSSSKPSCSSSYRSTTRSSRSSSTCSSSPSSRLGNRSPKRHWGTSSWPSSSSSCKCNSCSSSTCSTCRGRGWSACSPTKPRGPSRPFRKLFAQQTCPSCGRARVPPGSLPRTASSRRGWTSLARPPPLPRLPLPPRSHPPSPTIPCPTDSLLCSHLGETALPTRRPPAPTPCTDTESASGQAVRPCVKTWASLSNTSTQSTPWMTGVQPSAGYRCRWCSSWRSSSPRRASGCRP

SEQ ID NO: 143 - protein, 256 aa, Homo sapiens
CRRRCLPRNRCSRSCRPRSCRPCSSSSKPSCSSRSTTRSSRSSSTCSSSPSSRLGNRSPKRHWGTSSWPSSSSSCKCNSCSSSTCSTCRGRGWSACSPTKPRGPSRPFRKQLFAQQTCPSCGRARVPPGSLPRTASSRRGWTSLARPPPLPRLPLPPRSHPPSPTIPCPTDSLLCSHLGETALPTRRPPAPTPCTDTESASGQAVRPCVKTWASLSNTSTQSTPWMTGVQPSAGYRCRWCSSWRSSSPRRASGCRP

SEQ ID NO: 144 - protein, 33 aa, Homo sapiens
IKKKETFKKKTYTCAITTVKATETKAGKWSRWE

SEQ ID NO: 145 - protein, 78 aa, Homo sapiens
SLKKVMALYLKKHHLWRNRQKIRKLAPLIQKKQLALKHQLRHPLHPPHLVPKLQRRQFLAKQGQWGPPRAREKLTSSQ

SEQ ID NO: 146 - protein, 158 aa, Homo sapiens
SLKKVMALYLKKHHLWRNRQKIRKRTLKTTLKHRQLLLYLLLLLLSLDPNLNPKNHLCLRKGPLLGPATKVMKCLPLKKIPRLLVSRPPSLHPSQQAETRPERLLAPLIQKKQLALKHQLRHPLHPPHLVPKLQRRQFLAKQGQWGPPRAREKLTSSQ

SEQ ID NO: 147 - protein, 64 aa, Homo sapiens
KKTGSNEVTTRYEEKKTGSVRKANRMPKDVNIQVRKKQKHETRRKSKYNEDFERAWREDLTIKR

SEQ ID NO: 148 - protein, 52 aa, Homo sapiens
GKSKRMGQWCPCRLVMGKRAQPLSLTHHPQKNPPQPMGPPPECCSSWLRRIE

SEQ ID NO: 149 - protein, 48 aa, Homo sapiens
LMVELLLAIGVVMKPVFIFLNYSTFFHLLSFFLFLISCLLAKLRLFFP

SEQ ID NO: 150 - protein, 48 aa, Homo sapiens
LMVELLLAIGVVMKPVFIFLNYSTFFHLLSFFPFLISCLLAKLRLFFP

SEQ ID NO: 151 - protein, 126 aa, Homo sapiens
CRGAATETGSRHRHRCPRHPGRPSAIRSSSSTNTRCSTTNETGLLVWFQWSWNPPLNLPLCRLGPICPHLSLTCPHLSRHPLTTPRPHLSPTCLLLSRPLRSPHLPNPTWRPPLLTHPPPLPRNPI

SEQ ID NO: 152 - protein, 142 aa, Homo sapiens
EMAPDTPGPIKKTELVMGTLQTAPDNQALVTHRLPLVDRLHHPMNRQDQVQEKDMDPTTSSQQTAPDTQALGTDKLHLQSETVDTEGTVVVRPVTMRDIQKTQTHSQCQPTDRLGPISRATKSPHVAGQGKRLDIQDLSSTR

SEQ ID NO: 153 - protein, 63 aa, Homo sapiens
SETVETEGPVVARPVTARDTQKSQTHSQCQPTDRLGPISRATKSPHVASQGKGLDVQGLSSTR

SEQ ID NO: 154 - protein, 260 aa, Homo sapiens
IGLDTQVPITATPHPREGLMPPMGSQDPEVQADKHEMRNNQETAPGTQGHVIMKLPLRLTALDTHRWARDNHRGPGQVGTRDPVLARTVTVRDTQKTLRGGLGLLPETIMDLLRSSQEMAPDTPGPITKTELVMGTLQTAPENQALVTHRIPLVDRLRHPMNRQDQVQEKDMDPATSSSQQTAPDTQALGTDKLHLQSETVDTEGPVVVRPLTVRDIQKTQTHSQCQAMDRLVTISRATKSPHVTGQGKGLDVQGLSSTR

SEQ ID NO: 155 - protein, 260 aa, Homo sapiens
IVLDTQGLITATPRPRKGLMSPVGSQDPEVSADKHVMRNNQETAPGTQGRVTMKLPLGPTALDTRRWARDNHQGPGQAGTRDPVLARTVTVRDTQKTLRGGLGLLPETILDLLGSSQEMAPDTLGPITKTEPVTGTLQTAPDNQALVTQSLPLVDRLRHPMNRQDQVQEKDMDPTTSSSQQTAPDTQALGMDKLHLQSETVDTEGTVVVRPVTVRDIQKTQTHSQCQHREKLGPISRATKSPHVASQGKALDVQGLSSTR

SEQ ID NO: 156 - protein, 259 aa, Homo sapiens
IDLDTQGPITATPHPREGLMPPMGSQDPEVQADKLVRTNNQETAPGTQGHVTMKLPLGLTALDTHRWDRNNHRGPGQAGTRDPVLARTVTVRDTQTTPRGCLGLLPETIMDLLGSSQEMAPDTLGSIKKTEPVTGTLQTAPDNQALITQSLPLMDRLCHPMNRQDQVQEKDMDPATSSQQTAPDTQALGTDKLHLQSETVDTEGPVVVRSLTVRDIQKTQTHSQCQPTDKLGPISRATKSPHVASQGKALDVQGLSSTR

SEQ ID NO: 157 - protein, 259 aa, Homo sapiens
IGLDTQGLITATPHPREGLMPPVGSQDPEVQAEKHMTRNNQEMALGTQGRIIMKLPLGPTALDTHWWARDNHQGPGQAGPGDPVLARTVTVRDTQKILRGGLGLRPETIMDLLRSSQEMAPDTPGPITKTEPVMGTLQRAPDNQALIMQRIPLVDRLHHPMNRQDQVQERDTDPTTSSQQTAPDTQALGTDKLHLQSETVDTEGPVVVRPVTVRDIQKTQTHSQCQPTDRLGPISRATKSPHVAGQQEGLDVQGLSSTR

SEQ ID NO: 158 - protein, 259 aa, Homo sapiens
IGLDTQGPITATPHPREGLMPPVGSQDPEVPADKLVMTNNQEMAPGTHGRITMKLPLRRTALDTHSPARDNQRGPGQAGTRDPVLARTVTVRDTQKTLRGGLGLLPETIVDLLRSSQEMAPDTPRPITKTEPVTGTLQRAPDNQALIMQRIPLVDRLHHPMNRQDQVQERDMDPTTSSQQTAPDTQALGTDKLHLQSETVDTEGPVVVRPVTVRDIQKTQTHSQCQPTDRLGPISRATKSPHVAGQQEGLDVQGLSSTR

SEQ ID NO: 159 - protein, 259 aa, Homo sapiens
IGLDTQGPITATPHPREGLMPPVGSQDPEVQAEQHVMRNNQETAPGTQGHVTMKLPLMPTSLDTHRQARDNQRGPGQAGARDPVLARTVTVRDIQKTLRGGLGLLPETIVDLLRSSQDMAPDTPGPITKTEPVTGTLQTAPDNQELLTQRLPLVDRLRHPMNRQDQVQEKDTDPATSSQQTAPDTQAFRADKLHLQSETVDTGGPVVVRPVIVRDIQRSQTHSQCQAMDRMGPISRATKSPHVTGQGEGLDVQGLSSTR

SEQ ID NO: 160 - protein, 174 aa, Homo sapiens
ARTVTVRDIQKTLRGGLGLLPETIVDLFRSSQGTAPDTPGPITKTEPVTGTLQTAPDNQALVTQRLPLVDRLHHPMNRQDQVQERDTDPATSSQQTAPDTQAFRVDKLHLQSETVDTGGPVVVRPVIVRDIQKSQTHSQCQAMDRLGPISRATKSPHVTGQGEGLDVQGLSSTR

SEQ ID NO: 161 - protein, 44 aa, Homo sapiens
KVTKLLTSPQPILHIKKLILERNHTNVKNVAKPSTGPHTLLHIR

SEQ ID NO: 162 - protein, 38 aa, Homo sapiens
PANVKNVAKPSTGPHTLLHIREFILERNGTNVKIVAKN

SEQ ID NO: 163 - protein, 72 aa, Homo sapiens
NVAKLLTSLQPLLHIRKFILGRNPSNVKNVAKPSTGPHTLLHIREFILERNGTNVKTVAKPLAGFHTLLHIR

SEQ ID NO: 164 - protein, 105 aa, Homo sapiens
WRVRKWGDLQRITPHEKDMQQKSKKRKQLYIQNALNLSRPHSARLTASDTTRTRTCRTWRRSSASAASAWRRSFAASCTRGTSCTPWRAKISTMSTYREKLSGFP

SEQ ID NO: 165 - protein, 74 aa, Homo sapiens
WRQRKTLEEDCARLTASDTTRTRTCRTWRRSSASAASAWRRSFAASCTRGTSCTPWRAKISTMSTYREKLSGFP

SEQ ID NO: 166 - protein, 145 aa, Homo sapiens
RWSTVLTLKQIKISIRRISPAGQSHPPTGGPGGRGPCPWPGQTAGTRTTSTTVPQTTATSSTPPGGGTIQPQATGLLKPKISQNMIPQMARVTGVSGLSAASPAGTATRNGPGLVATRALQQNRGPVTVQTAQELKTLLGQLPPK

SEQ ID NO: 167 - protein, 322 aa, Homo sapiens
GSTTRKAARLGHPLKSALTTEVVVASGAAGVVVASSAMKTEDPLEATVAASRTEGEAAVEEATTEEVSTAAEVVAIARTAGVTTTGITTTPTTEAATTGLPSNSRHHSSLRHHSHHPSSHRHHPATALLGTPQGPAPTIRTATSLAQAPIPAPPPSAATALHSRVTASHPTTREVTARATQPHRLHLHHHLPTTMGATAVTTRPPIPHRHPPPHRPTLSPAITSISSMPSSGTSTIRTRASGRHTTGTTTTGATPGTHRVAQVHSSQCDPEAPGGPCRLPPPAPASAPPLPPPDPVVLGMGSSQGCLPPAHCLPSEGLPSPP

SEQ ID NO: 168 - protein, 288 aa, Homo sapiens
PVPLETLAAPAHVVGGPRASWDPMGKTTRAAAPKGTSWTRVSWTVWTWMNARTPPVPRSVSTPLGASAANAGLAMSRAVLERGPVRMWMSVLWVARLAPRAAPTQMAHFTAPVRRATSWPGRTGLSARTWMSVWARGAPSATACASTHKGPSTVAACQAGCWPQMGSLAPWGLCLWDHHLGPPMRRTKERKKGAPCPVLQQPVPQGAPRAPPRLHPPQVDLRCHLTPPSHLPHSRCWPPVGPQASGGSPASITPQLPLAPRSLQVGTPPWPHKTTMALTGKSCFYSTS

SEQ ID NO: 169 - protein, 195 aa, Homo sapiens
CIRTRSRQQPPHQPHTWWLDPCWALWGRRLPLSLTYWWAPRGMGPLRPLLSSSLPRGPLVVGPLRAQEQVLGVAPMGQYPWASCNQVPWARLGESPRYSTSCPRCPSSFRWHLPQHQPLGPRQRLPAALHPPPASVSPSHRALPPTAKSWLPLHPLLASPSCSLYPPPHPPKPSQFLPCRPRPRVAQPSCCLGRS

SEQ ID NO: 170 - protein, 39 aa, Homo sapiens
KMNQLIYRSKKNLLQKEIPLLQLSLLTDSKRNHGHPQLT

SEQ ID NO: 171 - protein, 127 aa, Homo sapiens
KCTRNFTLEKDTIHAVNVGRPSAARTHLFSIREFTLEKDLMTAVNVEKPTAEAPTLFSTREFTQEKGLISATNVGKPLAVKTHLFSTRDFILEKGLMSAVNVENSLAKAPTLLSTGEFIPGQGPMNA

SEQ ID NO: 172 - protein, 72 aa, Homo sapiens
VITSGVNAGESPATNTLFFTLESALEKGFMNLANVGKPAAVSAPLFSCKESTLEKGLMSAVNVGNLLAKPLI

SEQ ID NO: 173 - protein, 279 aa, Homo sapiens
PAQAFSSTMPLTMSGSHTATPSVRRPLTVEKGITNAVNVGKPSAAKTHLFNTRESTLEKGLMSAVNVGKPLAANPYLLSTRESTLEKCLMSVAYVGKFLIIALTLLYIKEYTLEQGLTSAVNVGKPIVTNLHLFSMRVSILEKGHMSAANVENTLVTNTDSLNIGVFILEQGLMSASHVGSSLAKALTLLHIKEFIMVKSLMCAVNVEKPLATNMYLFSIIEFTLEKGHISAVNVGRPSGRGLPSSATGKFTLEKGLRMGDNSVSLFNIITDIREKLQA

SEQ ID NO: 174 - protein, 140 aa, Homo sapiens
IHVTVVSVEKSSWVIRLLIATSELTLDTNHVSIRNMERSHIHINNVGKPSVISTPSRHMKGPPPERNPSIVKNVQKPLVLLETSEDTWRHTMEMDLINVSCVGKPLFGPVYFICTKEHTLERNRMNVSSVLKPFLFTVPI

SEQ ID NO: 175 - protein, 76 aa, Homo sapiens
SYHMKDLLKEKKISPCLQSNLGNRRTVHRKMRTKQKYLEPNASNMKYLKARKKKKMPQSPRMQQRFHQSKKKNKRL

SEQ ID NO: 176 - protein, 36 aa, Homo sapiens
ENLKNVDMAIYTLKKAVKVWMSVSYTKEVIMDLTNV

SEQ ID NO: 177 - protein, 23 aa, Homo sapiens
EKAVKVWMSVRDTKEVIMDLTNV

SEQ ID NO: 178 - protein, 23 aa, Homo sapiens
KKAVKAWVSIRCTKEVIMDLTNV

SEQ ID NO: 179 - protein, 23 aa, Homo sapiens
KKVVKVWMRVKYTKEVIMDLTNV

SEQ ID NO: 180 - protein, 204 aa, Homo sapiens
NILAPKIYSVSTRDCSLQKNLLCGVNVGNPLANMTASVIIKEFTLEKNLIRVGYVGNYLTVSPTSLYTREFTLERSHMSVRFVRNFLGTSTTSLHTREFTLEKGHMNAVIVGSHLPTALHSVFIREFTLVRSLMSAVNVGNLLPKAPVSLNTGEFTLEKSLTGAVNVKKNLGKSLHFVIIREFTKERAYECSESSLIKYWRIHT

SEQ ID NO: 181 - protein, 67 aa, Homo sapiens
KSSISSVSMPLNARLNGEKTLPQTSLQLLIPRSPSPRSSLPLLRDQDLCRGPRLPSQPAVPWQKEET

SEQ ID NO: 182 - protein, 63 aa, Homo sapiens
LILEKNLTNVKNVAKPLSSPQLLVNIINDGEKPYNCEECGKAFNQSSNFIEQNNSYRRETLQM

SEQ ID NO: 183 - protein, 55 aa, Homo sapiens
FILERNPTNVKNVARPLAGPQLLLNIREIIWKINPTNVKNVAKPLVYSQPLLNIK

SEQ ID NO: 184 - protein, 27 aa, Homo sapiens
FILEKNPTNVKNVAKPLTSPQFLLNIR

SEQ ID NO: 185 - protein, 27 aa, Homo sapiens
SILGKNHTNVKNVAKPLTSSQTLLNIR

SEQ ID NO: 186 - protein, 83 aa, Homo sapiens
FILERNPTNVKNVAKLLTGPQPLLNIKEFIQKRNPTNVKNVARPLTSSRFLINIREFIWKINPTNVKNVAKPLEYSQFLKNIR

SEQ ID NO: 187 - protein, 78 aa, Homo sapiens
ISANVKNVKKLLTNLQSLLNIKEFILVRNSTNVKNVTELLTNSQTLLNIKKIMLERNHTNVKNVAKPLTSPHTLLHIR

SEQ ID NO: 188 - protein, 247 aa, Homo sapiens
AGGAPTVLGGPRWLCCTQNVASGNGPLLARPAGKPRAASLSSWKALGPAAPAPTPPSAASLRPSLRAPGRPVGASRPAQTQGSLPRRLLPPFCGQTWPGSWGSQESSSLAVSTSFICCADISTALPLGSSRPAPAPRHREHEHGHQARPPRLLFTSLMPLSTPAAAQLLWTQLTPMGGRPGGRHSPPTLHTGPRALPPGPPHPSLHVAALSLLRMDSTLRQGRGLLTLVPASLFSLTLGGPGPWKDP

SEQ ID NO: 189 - protein, 102 aa, Homo sapiens
RSSSTTSTSPRTRSRTGGHPPWTHPTPRSCSSSSSSSSCRSSTSSSSSTTTTRPSCLPRQSQQARPWEAAGPPQYAASPLPIAAPARAPLGPVGWHVRTAPH

SEQ ID NO: 190 - protein, 244 aa, Homo sapiens
RASRCWSMRRLRWRRRHSSRRTACPWGAATCESPSAPLGPPAAVCWPLSSLPRPRPSIGGRDSSPSPTSCSCSTTWAHPRPSSCCSTPCSMAVRGGSRASWVPPQPCRCSMGQPCPRRCCSSPCRPRARRSPASWETHPWAPSSLGPSQPTPSSGSCLQEGACPRSCRPGEGSHHPCCHPCLALLGVTGRPWAWVPQRPSSLLPPPLWGSEALASEASRKTVGLCRRPLGSHCWGSPPRTTGFP

SEQ ID NO: 191 - protein, 154 aa, Homo sapiens
RRRRGGVGRRGVRPGRVRPGGTGRRGGDGGRAAAARAALGELARALPGHLLQSQSARRAARMAQLRRRAAALPNAAAWHGPPHPQLPSPHDSSGPVLRSPCPRGEHIPPGETDRCKDRNKPGSCWRRKSRPCVAWEIDLPACWEMEGLRLCGFS

SEQ ID NO: 192 - protein, 73 aa, Homo sapiens
HSQMHRIMLTTDYFRKHSNCVVFLPTPFCTTLRNFFLSSLILAVLCTNCIFRYTASFLQAFMLPGFLKHTKRK

SEQ ID NO: 193 - protein, 156 aa, Homo sapiens
RRCCPGIPMNLLRPPLVLQAHAGGRELGGPGRRWWPTQGPRSRTPSCSASQLGAASNSDPPMISSRIRMTRSPGAPLLLGVGPPEKMSCHCQNLRSRAGPANLPCSLCCSSRPEGAWTRMLWPLAPLLLFPMAGLESRSLPMVCTASVWILRRIVI

SEQ ID NO: 194 - protein, 120 aa, Homo sapiens [sequence omitted]

SEQ ID NO: 195 - protein, 387 aa, Homo sapiens
QCLLCPVQPFPNLLLCRVQKCCHPLPLLFPERAYLLRRLYPEQAYSLCPLYPEREYLLRPLYPERQYPLRPLFPGQAYPFLPLFPEQEYLLHPLYPERAYPLLPHFPERAYPLRPHFPERAYPLLPLFPERAYLLHPLYPERAYPLRPHFPERAYPLRPHFPERAYPLLPLFPERAYLLHPLYPERAYPLRPHFPERAYPHLPLYPERAYPLRPLYPEWAYLLRPLYPERAYPLLPLYPERAYPLLPLFPERAYLLHPLYPEWAYPLRPHFPERAYPHLPLYPERAYPLRPLYLEWEYLLRPLYLEWEYLLRPLYLVLGFPHLLPCQVWGFHLLQLPHSLHLGQESHRPLCFLYQALHSSHKLGVALYQPHRCVDFFLLHCQVACLD

SEQ ID NO: 196 - protein, 74 aa, Homo sapiens
AVARRFPSRTCPRSAGLVGLGGPPSRTRMRGKKVPPNHPLQNPEPSMASPPRRTPALRVPCSLKRPPSPGALAS

SEQ ID NO: 197 - protein, 115 aa, Homo sapiens [sequence omitted]

SEQ ID NO: 198 - protein, 93 aa, Homo sapiens
AKFQQCHSTLEPNPADCRVLVYLQNQPGTKLLNFLQERNLPPKVVLRHPKVHLNTMFRRPHSCLADVLLSVHLIVLRVVRLPAPFRVNHAVEW

SEQ ID NO: 199 - protein, 33 aa, Homo sapiens
GACLCLSWERPAHRGRESPQERGASPRAAPREH

SEQ ID NO: 200 - protein, 42 aa, Homo sapiens
LSLEKTTCLGEKKEATSNQDLLQMVPCSMQDPLLSLWTLFTE

SEQ ID NO: 201 - protein, 68 aa, Homo sapiens
TAPGPRIPSADVNQTFFVTLLYVNTVTLAPNVNMESSRNAHSPATPSAKRKDPDLTWGGFVFFFCQFH

SEQ ID NO: 202 - protein, 80 aa, Homo sapiens
AASLSSKSLIRKRMAVLTFLSVESDSGTKWWFWNVCLKKTSFIIRSLQHFTTGRLMTRSLVLRFKVLLMLGLLIEVSEEL

SEQ ID NO: 203 - protein, 2325 aa, Homo sapiens
PSVPQVPQVTPPLFLSPTLPQHPQVRPPLFLSPTLPQYPQVTPRLFLSLALPQHPQVTSLLFMSPALPQHPQVTPPLFLSPAFPQHPQVTPCLFLSLALPQHPQVTPPLFLSPTLPQYPQVTPPLFLSPALPQHLQVTPPLFLSPTLPQHPKVTPPLFLSPALPQHLQVTPPLFLSPTLPQHPQVTPPLFLSPALPQHPQVTPPLFLSPMLPHYPQVTPPLFMSPALPQHPQVTPPLFLSPALPQHPPVTPPLFLSPALPQHPPVTPPLFLSPTIPQYPQVTPPLFLSPAFPQLPQMTPPVFLSPTFPRHPQVRPPLFLSPAFPQYPQVTPRLFLSLALPQHPQVTPALFLSLTLPQHPQVRPPLFLSPTLPQYPQLTPPHFLSPAFLQLPQMTPPVFLSPTFPRHPQVRPSLFLSPALPQHPQVTPPLFLSPTLPQHPQVTPPLFLSPSLPQHLQVTPPLFLSPTLPQCPQVTPPLFLSPTLPQYPQVTPPLFLSPTLTQHPQVTPPLFMSPTLPQYPQVTPPLFLSPAFPQHPQVTPRLFLSLALPQHPQVTPPLFLSPTLPQHPQVTPPIFLSPAFPQLPQVTPPVFLSPTFPRHPQVMPPLFLSPALPQHPQVTPPLFLAPTLPQYPQVTPPLFLSPTLRQYPQVTPPVFLSPALPQHLQVTPPLFMSPMLPQYPQVTPPLFLSPTLPQHPQVRPPLFLSPTLPQYPQVTPRLFLSLALPQHPQVTSLLFMSPALPQHPQVTPPLFLSPAFPQHPQVTPPLFLSPTLPQYPQVTPPLFLSPALPQHLQVTPPLFLSPTLPQHPKVTPPLFLSPALPQHLQVTPPLFLSPTLPQHPQVTPPLFLSPMLPHYPQVTPPLFMSPALPQHPQVTPPLFLSPALPQHPPVTPPLFLSPALPQHPPVTPPLFLSPTIPQYPQVMPPLFLSPAFPQLPQMTPPVFLSPTCPRHPQVRPPLFLSPAFPQYPQVTPRLFLSLALPQHPQVTPALFLSLTLPQHPQVRPPLFLSPTLPQYPQLTPPHFLSPAFPQLPQMTPPVFLSPTFPRHPQVRPSLFLSPALPQHPQVTPPLFLSPTLPQHPQVTPPLFLSPSLPQHLQVTPPLFLSPTLPQCPQVTPPLFLSPTLPQYPQVTPPLFLSPTLTQHPQVTPPLFMSPTLPQYPQVTPPLFLSPAFPQHPQVTPRLFLSLALPQHPQVTPPLFLSPTLPQCPQVTPPLFLSPSLPQHPQVTPPLFLSPTLPQYPQVTPPLFLSPTLPQCPQVTPPLFLSPTLPQCPQVMPPLFRSPTLPQYLQDRPPLFLSPAFPQHHPLVTPRRFLSLILPQHPQVRTPLFLSPAFSQYPQVTPRLFLSLALPQHPQVTPPIFLSPTLPQYPQVTPPLFLSPTLPQYPQVTPPLFMSPMLPHYPQGTPPLFLSPALPQHPQVTPPLFLSPTLPQYPQVTPPLFLSLTLPQHPQVTPPLFLSPTLPQHPQVRPPLFLSPALPQHPQVTPSLFLSPTLPQHPQDRPPLFLSPAFPQHPQVTPPLFLSPMLPQCPQVTPPLFLSPAFPQYPQVTPPLFLSLALPQHPQVTPPLFMSPALPQHPQVTPPLFLSPAFPQHPQVTPRLFLSLALPQHPQVTPPLFMSPTLPQYPQVTPPLFLSPALPQHPQVTPPLFLSPTLPQHPQVTPPLFLSPTLPQHPQVTPPIFLSPAFPQLPQVTPPVFLSPTFPRHPQVMPPLFLSPALPQHPQVTPPLFLAPTLPQYPQVTPPLFLSPTLRQYPQVTPPVFLSPALPQHLQVTPPLYLSPTLPQHPQVTPPLFLSPMLPHYPHVTPPLFMSPALPQHPPVTPPLFLLPTLPQHPQVTPPLFLSPALPQHPQVTPPLFLSPTLPQHPQVTPPLFLSPTLPQYPQVTPPLFMSPALPQHPQVTPPLFLSPTLRQCPQVTPPLFLSPTLPQCPQVTPPLFLSPTLPQCPQVTLPLFLSPAFPQYPQVTPRLFLSPTLPQHPQVRPPLFLSPAFPQYPQVTPPLFLSPTLPQHPQVTPPLFLSPTLPQHPQVTPPLFLSPTLPQYPQVTPPLFMSPALPQHPPVTPPRFLSPTLPQHPQVTPPLFLSPAFPQYPQVTPRLFLSLALPQHPQVTPLLFLSPTLPQHPQVRPPLFLSPAFPQYPQVTPRLFLSLALPQHPPVMPPLFLSPTLPQHPQVTPPLFLSPTLPQHTQVTPPLFLSPTLPHHPQVTPPLFLSPRLPQHPQVTPPLCLSPTLPQYPQVTPPLFLSPAFPQLPQVTPPVFLSPTFPRHPQVRPPLFLSPTLPQYPQVTPCLFLSLALPQHPQVTPPLFLSPALPQHPPVTPPLFLSPALP

SEQ ID NO: 204 - protein, 375 aa, Homo sapiens
AQEWRLRSSPAPFIPPSLRPPLQGDRQDSQAQLLPVPLLRRQPPFPGWPRLRGQEPAEGLTLSAWRPRQPTPSQQSHPHLHRSHPLGLHLHKPRPTLCHLQGLVKPSPRPSSATPPLFLSPTLPRHPQVTPPLFMSPMLPQYPQVTPPLFLSPALPQYPQVTPPLFLSPTLPQNPQVTSPLFLSPAFPQHPQVTAPLFLSLTLPQHPQVTSPLFLSPAFPQHPQVTPPLFLSLTLPQHPQVTPPLFLSPTLPQYPQVTPPLFLSPTLPQHPQVTPPLFLSPTLPQYPQVTPPLFMSLMLPQHPQVRPPLFLSPAFPQYPQVTPRLFLSLALPQHPQVTPPLFLSPTLPQHPQDTPPLFLSPTLPQCPQITPPLFL

SEQ ID NO: 205 - protein, 1559 aa, Homo sapiens
PSLPQHPQVTPPLFLSPTLPQHPQVRPPLFLSPTLPQYPQVTPRLFLSLALPQHPQVTSLLFMSPALPQHPQVTPPLFLSPAFPQHPQVTPCLFLSLALPQHPQVTPPLFLSPTLPQYPQVTPPLFLSPALPQHLQVTPPLFLSPTLPQHPKVTPPLFLSPALPQHLQVTPPLFLSPTLPQHPQVTPPLFLSPMLPHYPQVTPPLFMSPALPQHPQVTPPLFLSPALPQHPPVTPPLFLSPAFPQLPQMTPPVFLSPTFPRHPQVRPPLFLSPAFPQYPQVTPRLFLSLALPQHPQVTPALFLSLTLPQHPQVRPPLFLSPTLPQYPQLTPPHFLSPAFLQLPQMTPPVFLSPTFPRHPQVRPSLFLSPALPQHPQVTPPLFLSPTLPQHPQVTPPLFLSPSLPQHLQVTPPLFLSPTLPQCPQVTPPLFLSPTLPQYPQVTPPLFLSPTLTQHPQVTPPLFMSPTLPQYPQVTPPLFLSPAFPQHPQVTPRLFLSLALPQHPQVTPPLFLSPTLPQYPQVTPPLFLSPTLPQCPQVTPPLFLSPTLPQCPQVMPPLFRSPTLPQYLQDRPPLFLSPAFPQHPLVTPRRFLSPILPQHPQVRTPLFLSPAFPQYPQVTPRLFLSLTLPQHPQVTPPLFLSPTLPQYPQVTPPLFLSPTLPQYPQVTPPLFMTPMLPHYPQGTPPLFLSPALPQHPQVTPPLFLSPKLPQYPQVTPPLFLSPTLPQHPQVTPPLFLSPTLPQHPQVTPPLFLSPTLPQHPQVRPPLFLSPALPQHPQVTPSLFLSPTLPQHPQDRPPLFLSPAFPQHPQVTPPLFLSPTLPQCPQVTPPLFLSPAFPQYPQVTPLLFLSLALPQHPQVTPPLFMSPTLPQHPQVTPPLFLSPAFPQHPQVTPRLFLSLALPQHPQVTPPLFMSPTLPQYPQVTPPLFLSPALPQHPQVTPPLFLSPTLPQHPQVTPPLFLSPTLPQHPQVTPPIFLSPAFPQLPQVTPPVFLSPTFPRHPQVMPPLFLSPALPQHPQVTPPLFLAPTLPQYPQVTPPLFLSPTLRQYPQVTPPVFLSPALPQHLQVTPPLYLSPTLPQHPQVTPPLFLSPMLPHYPHVTPPLFMSPALPQHPQVTPPLFLSPTLPQHPQVTPPLFLSPALPQHPQVTPPLFLSPTLTQHPQVRPPLFLSPAFPQYPQVTPRLFLSLALPQHPQVTPLLFLSPTLPQHPQVRPPLFLSPAFPQYPQVTPRLFLSLALPQHPPVMPPLFLSPTLPQHPQVTPPLFLSPTLPQHTQVTPPLFLSPTLPHHPQVTPPLFLSPRLPQYPQVTPPLFLSPTLPQHPQVTPPLFLSPTLPQYPQVTPPLFMSPALPQHPQVTPPLFLSPTLRQCPQVTPPLFLSPTLPQCSQVMPPLFLSPSLPQHPQVTPPLFLSPTLPQCPQVTPPLFLSPTLPQCPQVMPPLFLSPTLPQCPQVTLPLFLSPAFPQYPQVTPRLFLSPTLPQHPQVRPPLFLSPAFPQYPQVTPPLFLSPTLPQHPQVTPPLFLSPTLPQHPQVTPPLFLTPTLPQHPQVTPPFFLSPTLPQHP

SEQ ID NO: 206 - protein, 207 aa, Homo sapiens
PSLPQHPQVTPPLFLSPTLPQHPQVRPPLFLSPTLPQYPQVTPRLFLSLALPQHPQVTSLLFMSPALPQHPQVTPPLFLSPAFPQHPQVTPCLFLSLALPQHPQVTPPLFLSPTLPQYPQVTPPLFMSLMLPQHPQVRPPLFLSPAFPQYPQVTPRLFLSLALPQHPQVTPPLFLSPTLPQHPQDTPPLFLSPTLPQCPQITPPLFL

SEQ ID NO: 207 - protein, 1391 aa, Homo sapiens
AQEWRLRSSPAPFIPPSLRPPLQGDRQDSQAQLLPVPLLRRQPPFPGWPRLRGQEPAEGLTLSAWRPRQPTPSQQSHPHLHRSHPVGLHLHKPRPTLCHLQGLVKPSPRPSSATPPLFLSPTLPRHPQVTPPLFMSPMLPQYPQVTPPLFLSPTLPQNPQVTPPLFLSPALPQYPQVTPPLFLSPTLPQNPQVMSPLFLSPAFPQHPQVTAPLFLSLTLPQHPQVTSPLFLSPAFPQHPQVTPPLFLSLTLPQHPQVTPPLFLSPTLPQYPQVTPPLFLSPTLPQHPQVTPPLFLSPTLPQYPQLTPPHFLSPAFLQLPQMTPPVFLSPTFPRHPQVRPSLFLSPALPQHPQVTPPLFLSPTLPQHPQVTPPLFLSPSLPQHLQVTPPLFLSPTLPQCPQVTPPLFLSPTLPQYPQVTPPLFLSPTLTQHPQVTPPLFMSPTLPQYPQVTPPLFLSPAFPQHPQVTPRLFLSLALPQHPQVTPPLFLSPTLPQYPQVTPPLFLSPTLPQCPQVTPPLFLSPTLPQCPQVMPPLFRSPTLPQYLQDRPPLFLSPAFPQHPLVTPRRFLSPILPQHPQVRTPLFLSPAFPQYPQVTPRLFLSLALPQHPQVTPPLFLSPTLPQYPQVTPPLFLSPTLPQYPQVTPPLFMSPMLPHYPQGTPPLFLSPALPQHPQVTPPLFLSPTLPQHPQVTPPLFLSPTLPQHPQVTPPLFLSPTLPQHPQVRPPLFLSPALPQHPQVTPSLFLSPTLPQHPQDRPPLFLSPAFPQHPQVTPPLFLSPTLPQCPQVTPPLFLSPAFPQYPQVTPPLFLSPALPQHPQVTPPLFLSPTLPQYPQVTPPLFLSPALPQHPQVTPPLFLSPALPQHPQVTPPLFLSPTLPQHPQVTPPLFLSPTLPQHPQVTPPIFLSPAFPQLPQVTPPVFLSPTFPRHPQVMPPLFLSPALPQHPQVTPPLFLAPTLPQYPQVTPPLFLSPTLRQYPQVTPPVFLSPALPQHLQVTPPLYLSPTLPQHPQVTPPLFLSPMLPHYPHVTPPLFMSPALPQHPQVTPPLFLSPTLPQYPQVMPPLFMSPALPQHPQVTPPLFLSPTLTQHPQVRPPLFLSPTLPQHPQVTPPLFLSPTLPQHPQVTPPLFLSPTLPQYPQVTPPLFMSPALPQHPQVTPPLFLSPTLRQCPQVTPPLFLSPTLPQCSQVTPPRFLSPSLPQHPQVTPPLFLSPTLPQCPQVTPPLFLSPTLPQCPQVTPPLFLSPTLPQCPQVTLPLFLSPTLPQYPQVTPPLFLSPAFPQYPQVTPRLFLSPTLPQHPQVRPPLFLSPAFPQYPQVTPPLFLSPTLPQHPQVTPPLFLSPTLPQHPQVTPPLFLTPTLPQHPQVTPPLFLSPTLPQHPQVTPPFFLSPTLPQHP

SEQ ID NO: 208 - protein, 1254 aa, Homo sapiens
VTPPLFLSPTLPQYPQVTPPLFMSPALPQHPPVTPPRFLSPTLPQHPQVTPTLFMSPALPQHPPVTPPRFLSPTLPQHPQVTPPLFLSPAFPQYPQVTPRLFLSLALPQHPQVTPPLFLSPTLPQHPQVRPPLFLSPALPQHPQVTPPLFLSPTLPQHPQVRPPLFLSPAFPQYPQVTPRLFLSLALPQHPQVTPLLFLSPTLPQHPQVRPPLFLSPAFPQYPQVTPRLFLSLALPQHPPVMPPLFLSPTLPQHPQVTPPLFLSPTLPQHTQVTPPLFLSPTLPHHPQVTPPLFLSPRLPQYPQVTPLLFLSPTLPQHPQVTPPLFMSPALPQHPQVTPPLCLSPTLPQYPQVTPPLFLSPAFPQLPQVTPPVFLSPTFPRHPQVRPPLFLSPTLPQYPQVTPCLFLSLALPQHPQVTPPLFLSPALPQHPPVTPPLFLSPALPQHLQVTPPLFLSPTLPQHPQVTPPLFLSPALPQHLQVTPPLFMSPSLPQHPQVTPALFLSPALPQHPPVTPPLFLSPTLPQYPPVTPRLFLSPAFPQYPQVTPPLFLSPTLPRHPQVRPPLFLSPAFPQYPQVTPPLFLSPTLPQYPQVTPPLFLSPTLPQHPQVTPPVFLSRTLPQHPQVRPPLFLSPAFPQYPQVTPPLFLSPTLPQYPQVTPPLFLSPTLPQHPQVTPPVFLSRTLPQHPQVRPPLFLSPSLPHHPQVTPPLFLSPALPQYLQVTSPLFMSPALPQHPQVTSPLFLSPALPQHPQVTPPLFLSPTLPQCPQVTPRLFLSPTLPQHPQVTPPLFLSPTLPQHPQVRPPLFLSPAFPQYPQVTPPLFLSPTLPQHPQVTPPLFLSPSLPQYPQVTPCLFLSLALPQHPQVTPPLFLLPAFPQLPQVTPPLFLSPTLPQHPHVTPPLFLSPTLPQLPQMTPPVFLSPTFPRHPQDMPPLFLSPALPQHPQVTPPLFLSPTLPQYPQVTPPLFLSPAVPQHPQVTPPPFLSPTLPQYPQVTPPLFLSPALPQYLQVTPPLFLSPALPQHPQVTPPLFLSPALPQHPQVTPPLFLSPMLPHYPQVTPPLFMSPALPQHPEVTPALFLSPMLPQHPPVTPPLFLSPAFPQYPQVTPRLFLSPTLPLHPQVRPPLFLSPAFPQYPQVTPRLFLSPSLPQHPQVTPPLFLSPTLPQCPQVTAPLFLSPALPQHPQVTPPLFLSPTLPQHPQVTPPLFLSPTLPQHPQVTPPLFLSPAFPQYPQVTPPLLLSAVLPQLPQYPRTPL

SEQ ID NO: 209 - protein, 489 aa, Homo sapiens
HPQVTPPLFLSPALPQHLQVTPPLFLSPTLPQHPQVTPPLFLSPMLPHYPQDTPPLFMSPSLPQHPQVTPALFLSPALPQHPPVTPPLFLSPTLPQYPQVTPPLFLSPAFPQYPQVTPPLFLSPTLPRHPPVTPPLFLSPTLPQHPQVTPPLFLSPTLPRHPQVRPPLFLSPAFPQYQQVTPRLFLSPSLPQHPQVTPPLFLSATLPQHPQVRPPLFLSPAFPQYPQVTPPLFLSPTLPQYPQVTPPLFLSPTLPQHPQVTPPVFLSRTLPQHPQVRPPLFLSPAFPQYPQVTPPLFLSPTLPQYPQVTPPLFLSPSLPHHPQVTPPLFLSPALPQYLQVTSPLFMSPALPHHPQVRPPLFLSPALPQYLQVTSPLFMSPALPQHPQVTPPLFLSPALPQHPQVTPPLFLSPTLPQCPQVTPRLFLSPTLPQHPQVTPPLFLSPTLPQHPQVRPPLFLSPAFPQYPQVTPPLLLSAVLPQLPQYPRTPL

SEQ ID NO: 210 - protein, 1191 aa, Homo sapiens
VTPPLFLSPTLPQYPQVTPPLFMSPALPQHPPVTPPRFLSPTLPQHPQVTPTLFMSPALPQHPPVTPPRFLSPTLPQHPQVTPPLFLSPAFPQYPQVTPRLFLSLALPQHPQVTPPLFLSPTLPQHPQVRPPLFLSPALPQHPQVTPPLFLLPTLPQHPQVRPPLFLSPAFPQYPQVTPRLFLSLALPQHPQVTPLLFLSPTLPQHPQVRPPLFLSPTLPQHTQVTPPLFLSPTLPHHPQVTPPLFLSPRLPQHPQVTPPLFMSPALPQHPQVTPPLCLSPTLPQYPQVTPPLFLSPAFPQLPQVTPPVFLSPTFPRHPQVRPPLFLSPTLPQHPQVTPPLFLSPAFPQLPQVTPPVFLSPTFPRHPQVRPPLFLSPTLPQYPQVTPCLFLSLALPQHPQVTPPLFLSPALPQHPPVTPPLFLSPALPQHLQVTPPLFLSPTLPQHPQVTPPLFLSPALPQHLQVTPPLFMSPSLPQHPQVTPALFLSPALPQHPPVTPPLFLSPTLPQYPQVTPPLFLSPAFPQYPQVTPRLFLSPTLPQYPQVTPPLFLSPAFPQYPQVTPPLFLSPTLPRHPPVTPPLFLSPTLPQYPQVTPPLFLSPAFPQYPQVTPRLFLSPTLPQYPQVTPPLFLSPAFPQYPQVTPPLFLSPTLPRHPPVTPPLFLSPTLPQYPPVTPRLFLSPAFPQYPQVTPPLFLSPTLPRHPQVRPPLFLSPAFPQYQQVTPRLFLSPSLPQHPQVTPPLFLSPTLPQHPQVRPPLFLSPAFPQYPQVTPPLFLSPTLPQYPQVTPPLFLSPTLPQHPQVTPPVFLSQTLPQHPQVRPPLFLSPAFPQYPQVTPPLFLSPTLPQYPEVTPPLFLSPSLPHHPQVTPPLFLSPALPQYLQVTSPLFLSPALPQHPQVTPPLFLSPTLPQYPQVTPPLFLSPTLPQYPQVTPPLFLSPTLPQCPQVTPRLFLSPTLPQHPQVTPPLFLSPTLPQHPQVRPPLFLSPAFPQYPQVTPCLFLSLALPQHPQVTPPLFLLPAFPQLPQVTPPLFLSLTLPQHPQVTSPLFLSPAFPQHPQVTAPLFLSLTLPQHPQVTSPLFLSPAFPQHPQVTPPLFLSLTLPQHPQVTPPLFMSLMLPQHPQVRPPFFLSPAFPQYPQVTPRLFLSLALPQHPQVTPPLFLSPTLPQHPQDTPPLFLSRTLPQCPQVTPPLFL

SEQ ID NO: 211 - protein, 84 aa, Homo sapiens
PTALPLSCRSQFHHQIETVLQYLKRTQRWELPKKKMKQFLRKYQNLKWKILHYQMLQRIQRVVHLEGLCQLKKVIHFKKSKIIW

SEQ ID NO: 212 - protein, 32 aa, Homo sapiens
RYIPPIQDPHDGKTSSCTLSSLSRYLCVVISK

SEQ ID NO: 213 - protein, 60 aa, Homo sapiens
VNIKEFILERILTNVKNVAKLLNGSQPLLDTREFILERNPSNVKNVAKLLSSPQPLLHIR

SEQ ID NO: 214 - protein, 97 aa, Homo sapiens
KSFIKFSIQIDTRQDILERNLSNVKNVMNHFACFYTYINIKEFILERILTNVKNVTKCLSGSQPLLDTREFILERNPSNVKNVAKLLSTPQPLLHIR

SEQ ID NO: 215 - protein, 270 aa, Homo sapiens
NIKNVAKLLPGAYILDIRKFILERNLTNVKNVTKPLTRVHTLLNIRESILERSLSSVRNVAKLLTEAHTLLNIRESILERELSNVKNVAKPLTGGHTLLNTRESIPERNLSDVRNVAKPLIEAHTLLSIRECILERNLSSVRNVAKLLTELHTLLNIRESILERNTSNVKNVAKPLTGAHTLLDIKESILERSLSNVKNVAKLLSGAHTLLNIRESILERNSSNVKNVAKLLPGAHTLLNIREFILERNLSNVKNVAKLLTDAQPLLNIK

SEQ ID NO: 216 - protein, 170 aa, Homo sapiens
ARRQQAPRSPSHLHCRRRHPRPLAVPRLLCPQRGLLRTAVRTWPPTRWELPAQVVGLGAPTLTPRRLPPPTTLCLLEETPAVPPALPCWGRQPPLEMGSAAWWAQRACPKSSWSIGNGPSRRCETLSDCCSAAERLSPSSRGPQEERVRGAHQHKPPLPPSSHPRPLPAG

SEQ ID NO: 217 - protein, 175 aa, Homo sapiens
NILAPNTYLFNSRDFPLERNVIAGNVGNPLANMIASVIIREFTLGKDLMNVENVGNLLVIRAALFSISEFTLGKDLMNVENVGNLLVIRAALFSISEFILEKDLMSVENVGNLLVKMVLSLNINEFTLEKDLMSVKNVGNVLLRRAISFNINEVTLVKDLMSVKNVENVLVKRAP

SEQ ID NO: 218 - protein, 144 aa, Homo sapiens
ESTVEKSLTFVVFVGKVFVMEVRIDFTYEYIMMIKDMSAMNVEKHLSVMITLQSTKKYIQVKKLISVKNVENVLVVGIISLFITKAYTLERKCGKNIKQHFINVMFVRKFLKANQVWKCIFERIQVKNHTSVKFAISLLELRKH

SEQ ID NO: 219 - protein, 108 aa, Homo sapiens
GTEAGESGGPTAGPLCATNDATEGAAGGRAAPGTPEFFPRSQETPKPVTAPATLPAGIRPPGEPAGLPAGPTAPKPGGCLPSTEAAAAAATTAAAAAAAGSPTPDAAL

SEQ ID NO: 220 - protein, 191 aa, Homo sapiens
ESKGEGKGTQRERGTPACPQEGERRGPHGNCSHDLSPAAHHGVCGRPCTAAGPAGRVDFGPHSIAHKPVPSLLCTRLFSLLCSPDPWRPAERVPAAYVWHGRPVPLQPCTVAGPDGAVPRLPTAAVPAIPAESAGGNSAAAAAATTAAAAAKSAAAAAQSKPNPSPPRGSFPRQRPCQRIPQTRRTEKHPP

SEQ ID NO: 221 - protein, 166 aa, Homo sapiens
LRSSEPADAFCFAFPEQAFSPTLHPTATAATAAAAAAAAAAAAATAAAAATATATATAEFNFSSTTATAAELNFSPTAAAAATTAAAAATTTATTAAAAAATTIFSACPISTKPAFAKVTFATSAKAPTSANAESAHCRNGIPSLPTTETGSTLCGRPEHRPQSKS

SEQ ID NO: 222 - protein, 206 aa, Homo sapiens
LPRPSLSGTSSCRTQARSCPSACTLCPTTGPWRAWPLTSMSPQLMSPLPGPSMSPRWWLGEEPYCPRIFLSPLWQLQCPQRNKPTCGWLRQRSPQSCRSAWAGRRRGGRGRRRCARWRRPLSFTPLPLPPVPFLDCLSCPGRNAWWLQVPGELGTLADRERGPWSPTHSAQSPVPLRIHFCPVHRPPWHGLMAADRAWGLFTPAPT

SEQ ID NO: 223 - protein, 104 aa, Homo sapiens
TASTSMGLRTPKTQASPPACKTCLTSARPTPAIGRGPKPARTSWATSSACVKLAGGAGSATKMSTNAARRTGAASRSATTSRVASTVPATAASSSPLMAGPAKT

SEQ ID NO: 224 - protein, 116 aa, Homo sapiens
IQWLWSLPPWISLGDLESWQGTRLAHRCPQAGPALCKGYCNHSSQVASRPSWRRPPSLLCNPPLLPPSPRSSPSHASSAARRSNFRATWWCTGAATRARSPTSATCATTRAPRPAS

SEQ ID NO: 225 - protein, 83 aa, Homo sapiens
AQISHSVLCLLMKIFKVGGNRFRLCITILPGMKMSWSSEKVMSLMSWKSVMTAGLWGPQEEPNSLVLSPETTSRGCELRSLLL

SEQ ID NO: 226 - protein, 228 aa, Homo sapiens
TWRSAPWGRSPAKASTWPSRISVPVWRCSPSVSTTRSAPSCCRAWPTSLRPSPALMHLPWPLWPAPVWTMPWCHRGVKSPVCTVQWMASGWCPLGSACARQATRRWRMPARPARLDFLSLRHLRAPAWSALSTRCHPLRVPPPASVRKASSGHLRTQRRCLAHDPPPPHTTSQPWAWVPRWSCAGRPLRTAGAARTLSTASPANSAGPSLGNAGRVRPVCATRSLLTD

SEQ ID NO: 227 - protein, 281 aa, Homo sapiens
PVPAAQRPPGGAGHARPGHLHGQLRHQQHRGHPGERGPRVDVQAAGAAATPAAAPTGPAGPAGAPAAAGGAPTAAGGTPAAATGAHADHAEQRAGPVPANAHQDGAAEPQPLQRAAAALAPTDRLQPLQPPTLQPLLPAHHPLTVRLHRPPELQLLLQPRGRPGHRPLLHLHLHEPRSAPHVHPHRRHLWGPFHPADPQPPALGTTRLHTAHSTLRRPPTKGEDGRDDPKNNRRKRGPTRIPFGHLCFFVFLFCFVFSSSSSSLKTFKLKATRTQISKTQT

SEQ ID NO: 228 - protein, 91 aa, Homo sapiens
LLVCCPKTQRIVPVWMTSFDMTFFCRASLRTDCLLAVVIQFQISTYQAQLRISLRKQLLLFLVAKKTKQDILTHIIECLKKMKTSTSLGMI

SEQ ID NO: 229 - protein, 269 aa, Homo sapiens
RAQRARRVKTAFLGLKETWASRVIGGRSAHPVPGEKMALKAQRVAEVPMVTPVLWDPLGRRENSESQGYQGIQEDKDQRALLDSLDFLAPMERRAAGGPLESQDRGGSEAQRVRGVKEAPGASLGSLAPRATPEVTAQLALLVNGDPMDPKDPQDFLDQRAPLALQARMDSQDTLDREARLVSKARPALQAPPAWSALRVPREKRAQWVSVATLGPLDPPVNRGFRALLEKKGRRVTQALQASLGKMALQDYVVSLGTEGFLVQWELLD

SEQ ID NO: 230 - protein, 50 aa, Homo sapiens
KPISLLKGRKKRSSRIPMHPRGLLWPFSCSALSIAQKSKENILACPLMML

SEQ ID NO: 231 - protein, 75 aa, Homo sapiens
KPISLPKGRQKRSSRIPMHPRGLLRPSSSSALSIAQKSKENILACPLVMLRRNWERCGITLLQMTSSLMKRRLRS

SEQ ID NO: 232 - protein, 193 aa, Homo sapiens
PWRWWATGPRPPGPIGRGVSSCRLRAAATGSQPRPTAVAVAAKTGPGATLGLQGVSTPVPRARPGARLQHEPPPRPPPPRPWASSSASSLATCTLTSSRSSGPSSWASASSSSSAQTRSSTRTGTRRPKSSTCGTSTPPSSTCTASAPKTWRPPRPPPRPPPPLRRRLPPPRRPPGPYRSTASSATCSRGAWS

SEQ ID NO: 233 - protein, 159 aa, Homo sapiens
RAVTTASTCAPPSTATAPWTSASSTRSAKWATSTGARCLTSGAAAACWRRCSATSRGRARSPRVRSSPVPTPPSRTLPKLCLALSPPSPPWWMTNLTTRRSTRRSCWTSPGMHTQTSRAPQPSRAQTWRTSPHCGIDTPVWLSQNCLRAPLTRTGRGLC

SEQ ID NO: 234 - protein, 131 aa, Homo sapiens
WSARAGMDTRGPGQARGSWVRRPRPKPGLITICRCRKMTGGVTPPVARMGRSPAAGCGAAATSKPWGMRRAETQTAAPRHLPKQSPDASPPVAPPAWTRPGSTAVSHPGSTPGAPSLATAVPSPLDSSAMS

SEQ ID NO: 235 - protein, 21 aa, Homo sapiens
TPSSSSKTKKTATKIYSQRSY

SEQ ID NO: 236 - protein, 91 aa, Homo sapiens
KKLILIQHGGIFTFRFWVEKLSWNICKNLSLYLDKFVQRLLYVYIIETNVFVLNLFHVPVNQIFMMAFYLKYTEKAWVMELEWLIQQQCYQ

SEQ ID NO: 237 - protein, 79 aa, Homo sapiens
QVVEMAMEPNCVTYSVPNLLWKQPVENTRKCSNRHGWIIWEELVRWNSSPSMEKIIHVSPFSLICLSLKCKAWTKILLH

SEQ ID NO: 238 - protein, 52 aa, Homo sapiens
WQTIQQCLPPLLAQLVAVVAAVVVEELTTLSKMHCREPGRLQQKLEVMQGHH

SEQ ID NO: 239 - protein, 78 aa, Homo sapiens
MMKRKKSLPQKVLRRKLTEHIQRPSVVLEVLLTHFWTFLMIQMLLCTKVDSWLGKFMQIWMERRLQEENEDGKPFMLY

SEQ ID NO: 240 - protein, 48 aa, Homo sapiens
LYPDIQWLFLLLWHMLSPLFSFLFFCTIGRKMEKQSDLKERRLQSSES

SEQ ID NO: 241 - protein, 122 aa, Homo sapiens
RFNVLDVFLTLPLTINLLEELSLNYFLMCAPKHARTFVVFVQVKRGPGNQLRNHYIIRVVSFTELSRILWFKVVTSVKEMDEEGNLSMEDFLKTRVSLLNTTKNFSCQWPTEGRIQMVHSSS

SEQ ID NO: 242 - protein, 77 aa, Homo sapiens
QMMQMTLQWKSQPCRILIMRMASGRRSQRKRRRRKSTRKFRTRTLFSKAVTPVVTKVTIKRKKRKENTVKRPNLPHL

SEQ ID NO: 243 - protein, 136 aa, Homo sapiens
ERNNINVMYVTRSLFGSDTLHAIVDVTLVRNLTSVMSVASPSVRCHPLHIIIDFILERNLTNVKNVTKLSDTIQPFKDIGEFILERNHISVMSVARPLVRSHTLHAIVAFILERNLTNVKNVTKLSVSNQTLKVIG

SEQ ID NO: 244 - protein, 244 aa, Homo sapiens
KRNNVNVMYVARSLIRSDTLPAIVDVTLVRNLTSVMSVARPLVIIHPSSFTKRFILERNLMNVKNVTKFSVANHTLKDIRGFILERNHTNVRFVMRLSHIIHIWQNILYFTLERNLTHVMNVAKFLIDYQPLHAIIDFILERNLTNVKSVTKFSVANHTLKDIGGFIVERNLTNVKNVAKFSVANQTWKDTGGFILERNHTNVRFVTRLSRGIHTWHNIREFILERNLTSVMSVARPSVRHHRL

SEQ ID NO: 245 - protein, 27 aa, Homo sapiens
FILERNLTNVKNVVKLLNTLQPLLNIR

SEQ ID NO: 246 - protein, 87 aa, Homo sapiens
FTRQFILERNLTSVMNVARFLINNQTLHVIIEFILERNLTNVKNVTKFSVANHTLKDIGEFTLERNHTNVRFVTRLSDVIHTWHNIL

SEQ ID NO: 247 - protein, 161 aa, Homo sapiens
PPLSVISVDKTSVINLTSLDMSEFMLERNLTNVKNVEKPSVGRKILLHIRKFILGKNRISVMNVEKLSFRCQTLLDTTEFILGRNLMHVRIVGKPSVRNQISLNMSEFTLERNPMNVRNVGNPSARSKILLSTRKFILGRNLMHVMNVVELFLECHLLRYI

SEQ ID NO: 248 - protein, 272 aa, Homo sapiens
LILERNHTSVMIVARPSVICQPLHAIVDFILERNLTSVKNVMKLSVSNQVLKDIGEFIMERNCTNVMSVARPSVRSYPLPAIVDFIVERNLASVENVTRLTVSNKILKYVRKFILERNVISVMIVARSSVIRHPLYTIINFIVERNLTNVKNVMKLSVSNQTLKDIGEFTLVRNLTGVIGVARPSVIHHPLHAIIDFILERNLTNVKNVMKLSDTNQILKDIGEFIMERNRTSVMSVARPSVRSHALHAIIDFILEINLISVMSVARPSVRS

SEQ ID NO: 249 - protein, 85 aa, Homo sapiens
IERESSTNEKKLSRISKLFCLTWYVLQMCHGLILVGPSEKITAGNLDPYWKERRKRSFLMNTLKHLPKKRESTLGNFWMKLLQLP

SEQ ID NO: 250 - protein, 139 aa, Homo sapiens
FILERTLTTVMNLVRLLSKVQNLQDITEILLGRNHTNVVNVVELLVIKQVWCTIREDILERCHTNVLNVGKSLTPLQPWQGIGEFILERNLTNVMNVARSSVIAQASHVIGVFILERNLTNVMSVAKPLEYVQFCLIIR

SEQ ID NO: 251 - protein, 367 aa, Homo sapiens
NTLYYIHSMGEHTLEKNHTSVMTVERLLAKVRTSLIIREFTLDRDLTNVTSVAKPLTSVRTSLGIRESIQERNHINVIYVARSVVKIQILQVIRGCILERNLTNVMNVVRHLSSVHTFGVMKEFILERNLTNVMNVTKPLLNVQALPNIRESILERSLTYVMSVAKLLSSAHISLGIRIYILERNHTNVMCVAGLLSKVQVLWNIREFTLEKNLTNVINVIKLLSNVHTFGVIRELILERNLTNVLNVAKPLLNVQILLSIRKSILERNLTNVLNVAKLLPNLQTSLDTRKYTLKRNIVNIIYMVMLYSKVQTLEIIKKVIIEKNISNIMRQKLSIQAVPSIRGSIVKRNHIKRKCGKAFSYGLCLT

SEQ ID NO: 252 - protein, 211 aa, Homo sapiens
FILERTLTTVMNLVRLLSKVQNLQDITEILLGRNHTNVVNVVELLVIKQVWCTIREDILERCHTNVLNVGKSLTPLQPWQGIGEFILERNLTNVMNVARSSVIAQASHVIGVFILERNLTNVMSVAKPLEFPERVNRRQRHVSYKACKITESRSVAQAGVQRRDLSSLQAPPLGFLPFSCLSLPSRWDYRRPPPRLANFFCIFSRDRVSPC

SEQ ID NO: 253 - protein, 87 aa, Homo sapiens
ITGEVTLETNPTYVMNVASPLVKVPTLQFIREFILERNLTNVIDVGSALVKVPLLQLIRQFILETNPTNVMNVAKPLNGTQASLHII

SEQ ID NO: 254 - protein, 168 aa, Homo sapiens
RNLTNVRFVTRFSCVIQSWLYILEFTLQRNLTSVMNVGKLLINNHIFHVIVDFILERNLTNVKHVTKFLVRNQLLSHIREFILERNHTDVRFVTQLSRGIHSWHDIQEFTLEKKLTSVMSVGRPSVTSHHLYGIVDFMVERNLTNVRFVTRLSCVVPMWQNILEFTVE

SEQ ID NO: 255 - protein, 166 aa, Homo sapiens
NLTNVRFVRRLLRVIPIWQTILEFIVERKHTSVMSVVRLLIINQALHVIIYFILERNLTNVKNVTKFSVRNQPLRDIREFILERNHTNVRFVIQLSRVIHSWHDIEEFTLERKLTSVMSVARPSAAGHPFYAIVDFIVVKNLTSVISVAIPSVTGHPLYTIVDFTL

SEQ ID NO: 256 - protein, 78 aa, Homo sapiens
FILERHLTNVMNVARSSFNVHVLQGTGEFILERNPTNVMNVARSSVNIHILQCIREFILERNLTNVMNVAKPLIGAHY

SEQ ID NO: 257 - protein, 162 aa, Homo sapiens
NLTSVMSAARPSVTGHPLYAIVEFIVVRNLTSVVSAARRSVRRQPFYAIVDFIVVRNLTSVTTVAIPSVTGHPLYTIVDFILERNLTNVRFVTRLSCVIHTWQDILEFTLQRNLTSVMNVERLLMNNHTFHVIIEFILERNLTNVKHVTKFSVANHTLKDIG

SEQ ID NO: 258 - protein, 94 aa, Homo sapiens
SIAERKFIIPFQILVTEKNSPLEVGAVTWQIKKMNWLVQATCLKNYTMIVEHIWLTPVILVLHRQKAHHQNIVGFFLRFLRTMKQWPKFCSAGI

SEQ ID NO: 259 - protein, 66 aa, Homo sapiens
ASIAPVTVSTAWPASSPGLTSMVSTRSAWSACLQRGARRPPPKCLSCGGPRLLHPGSQSPHSEPWL

SEQ ID NO: 260 - protein, 35 aa, Homo sapiens
EMSIYREVFFLTVPQDLHFSPQPPHSEGRMSFHQG

SEQ ID NO: 261 - protein, 45 aa, Homo sapiens
VFSLSLCWSSWPVCYGKKGLSLSYGPVSPIIRRLWNIFVRNQEKI

SEQ ID NO: 262 - protein, 43 aa, Homo sapiens
GFWIQSIKTITRYTIFVLKDIMTPPNLIAELHNILLKTITHHS

SEQ ID NO: 263 - protein, 22 aa, Homo sapiens
QKMILTKQIKTKPTDTFLQILR

SEQ ID NO: 264 - protein, 57 aa, Homo sapiens
PTLRWGLGGSQQPCPRGQQVSSMPRSQVGSPPILSGPLGRVHLWAPPLPCVSLSLRQ

SEQ ID NO: 265 - protein, 167 aa, Homo sapiens
QKPTYACFNVPRTTLSLLWTGSLPAPPATTSGGAACPSGRRYPGAGNAGSATSQCQLTRCGAWLSSTARSVGTTSGAGHRWGPRPPATGAASPCIQHGSSPRAGTGTRIAAAPTLTPAQLPTATTGESPTCLGHPVLTPRAGSRTTCPKCSTPATLTLAVAPLWPPA

SEQ ID NO: 266 - protein, 342 aa, Homo sapiens
PPSSATASWWPRWCGRACGCPAWCRARARCSARCTTHCWLCRRTCRPHVPSVSLPSCWPCLASWWPSQVPSVPRVWRTKVPRPVSCSPRGSSSSSPASWCSSLCAGRRTPSSRTSTTPWWLRPSSGSWGPPSTWAGRRLHCLCWAGGSSAARAPRPRSSGPADLGWATPSPPARVHLDWTRGTTCEAEVSPGSPLLPTAPPFRPWPDDQMPCSITTSFPRKTHFPKAQATPGCRAGSAGLAELFSVGSPLMFSPKLGSLEVLGTLACPHLPSNCFLPLPRTLAGLPSLLSPPLPQEPWPHQNSSSSLAPKPGSRPCPPNPGVVREGLPITSLSPTSPPSSWK

SEQ ID NO: 267 - protein, 108 aa, Homo sapiens
PCQGPGPPRLLLLPQSLRPGPASTRNPCRPPCTPTRPLGCPPRRVTVRCRGPAQPPSVSLLPPHPPTTSAAVVEPQTELTSPGVCPAEAPSMLGSSDRCGTSRICPTV

SEQ ID NO: 268 - protein, 177 aa, Homo sapiens
PIAAPHPHPTRYSAACRPIPSSGASATRQLVLPFPPLILTLRRLRVTTQKISGLRRTGSQGGKPAAQPRCLPAPCPVWRGRRPPQPPPRTASSPPAQIEAGIPHFWSGPASARPPSRMAKTAQPPSVSLLPPHPPTTSAAVVEPQTELTSPGVCPAEAPSMLGSSDRCGTSRICPTV

SEQ ID NO: 269 - protein, 176 aa, Homo sapiens
PIAAPHPHPTRYSAACRPIPSSGASATRLVLPFPPLILTLRRLRVTTQKISGLRRTGSQGGKPAAQPRCLPAPCPVWRGRRPPQPPPRTASSPPAQIEAGIPHFWSGPASARPPSRMAKTAQPPSVSLLPPHPPTTSAAVVEPQTELTSPGVCPAEAPSMLGSSDRCGTSRICPTV

SEQ ID NO: 270 - protein, 20 aa, Homo sapiens
KKEACFKRLLAETCWNGNAL

SEQ ID NO: 271 - protein, 66 aa, Homo sapiens
NMTPSGSKSLTLSMRWSGAAMSTSSSGRLRWSLTTWRRWWCPAWPECARTTWEAPPACWRSSGRPS

SEQ ID NO: 272 - protein, 57 aa, Homo sapiens
PRPRRCTRHPACPLDHTTPPAWSPPWVRALLDAHRAPSESPCSPFRLAFLQEQYHEA

SEQ ID NO: 273 - protein, 33 aa, Homo sapiens
ASCPPPAATWGAPLLEWAFPGLSGHASSQPVSP

SEQ ID NO: 274 - protein, 102 aa, Homo sapiens
RRCGRCWRRGRCPTHRIVTVGGRSRWVEGLQREQGMAGDSGGRSLQGNWNQVALRFSGKRGGFLGSFQKGFVITDLLLATPWGLGKPRKRNEEPRAYRSLEC

SEQ ID NO: 275 - protein, 109 aa, Homo sapiens
WRAASRRPVSDGTSTLSPRHHWRVTSPGSVCGALACPSSTFPRGPGEAGMSWEEAGGLAPHLLCCRGQQRKTMWTCHCLVPLCLAQGSRLKGPQVDLETLRVENGGRPA

SEQ ID NO: 276 - protein, 59 aa, Homo sapiens
RKRRKKTSIQKKQRKKRKKRARNRNMKKTMSHLIAHQALKMSGLRLFHPRLLTRKKPGK

SEQ ID NO: 277 - protein, 57 aa, Homo sapiens
GSISPIGMEPTTMSSQCGVILQRSRKMATRKKRFQMQPLSLMPAHWSICLLRDSMIW

SEQ ID NO: 278 - protein, 183 aa, Homo sapiens
RRSTVSSTATSSPPTSCWTSGARSSSATSASAAAWWTPKPRRGAPAVPPTWHPSALTPQTPPSRTMTSGPTYGAWASRCPARLPPRWSWQQDSFPTRTARRTLRSSPKSYRKSPRFCPDTWASRGTSSPSSKTALLKITGRDQSIISYLNTASSSATRRWRWTWRPGSRMSWRRLSHRGLAAS

SEQ ID NO: 279 - protein, 176 aa, Homo sapiens
RRSTVSSTATSSPPTSCWTSGARSSSATSASAAAWWTPKPRRGAPAVPPTWHPSALTPQTPPSRTMTSGPTYGAWASRWWSWQQDSFPTRTARRTLRSSPKSYRKSPRFCPDTWASRGTSSPSSKTALLKITGRDQSIISYLNTASSSATRRWRWTWRPGSRMSWRRLSHRGLAAS

SEQ ID NO: 280 - protein, 140 aa, Homo sapiens
SSWAQRFASPRPPIAPPPAPPEPSPATTPSAAGGPWSTPPDWRFVPRRGVSWWCTTAGGVSRFLTQGEDARISLERRGTLPKTLGTLWMSPSPTTAMWLSLTPAIAPSKCLIFLARSSLSLEANSPYLGVWRPPLRMGLW

SEQ ID NO: 281 - protein, 25 aa, Homo sapiens
TKKRKTANYERQPREPTKMWHQSRL

SEQ ID NO: 282 - protein, 78 aa, Homo sapiens
RAAVMPPTDVSPADSSPGLPQLPHHPWWQRSPRRGQDLAVKGSGLKTLGNGPDDGAPHPSSTDGGLCEAPGLPTSSSL

SEQ ID NO: 283 - protein, 219 aa, Homo sapiens
HVSAGWRGRPATATGEPALLSTCAEWCPAPQQDHPADPGACEHTQRPGAAPEPSHTPWTHLSASEGPVALLHQNHLCAVSGRARAAPGYQPCVQPGWNSHLVRAHELCSSRLHLAGAQRPRLRAAPALSRPSPTAGSRSGGRVTCAQSPAAACLCSPRRSCHNSILLWQPCTHLLSTPGPAIPGPPKPGLHCGHQHNPTCSHHSAQGPASPCHCHPSPD

SEQ ID NO: 284 - protein, 126 aa, Homo sapiens
AMGMAAQGKRQAVPAVLAPRAPLNLERSYHHCLGDLGQGTPGSGQAGALQSRTLGQEEKRRLARPPSPPLQGEESLRGLGLGGWQQVGLGVVQTDWSQRWYAWWWKVWRGSSGASQGGMLGRSHPC

SEQ ID NO: 285 - protein, 35 aa, Homo sapiens
LWWRKRMMTKKGCCRLLTEMGKRKRKRRSHWMKAQ

SEQ ID NO: 286 - protein, 65 aa, Homo sapiens
KLLKLYMNTIVVVKVIILHPPRLLKKKGEKNDLQLFVMSDTTYKIYWTVILLNPCGNLHLKTTSL

SEQ ID NO: 287 - protein, 37 aa, Homo sapiens
RKIPQEKMRPKKGRLQKLQMLSLSHCHLQNQNLLKLR

SEQ ID NO: 288 - protein, 70 aa, Homo sapiens
YKKKLKRQMGSSLLVSMKNPYHLLGPHSLMVTIKWSSRKRYCILQVSHYMMKKGKRDKLPFLLLINFHSA

SEQ ID NO: 289 - protein, 59 aa, Homo sapiens
WFLLLTNPDKRSDTLHWGGCPLSLWKRLKVFSRDGLSEDQVLHRLTVGKSHLLEFQTPL

SEQ ID NO: 290 - protein, 51 aa, Homo sapiens
SPKRVSLPPAIKNSCSRQKGLTQTDILHFLFPTDSLPPPSLPPLPFWVLGL

SEQ ID NO: 291 - protein, 88 aa, Homo sapiens
PMEVVQTENQVIPVLSQLQEKKLFHLLLKVVQKKRKKNHKDREKKKRNLILMIKVHKFEHHLLPSPLHNLSKYTDKLQKARMLLPPKA

SEQ ID NO: 292 - protein, 67 aa, Homo sapiens
KKLKPIFPLMRMDLQMMSQKKGKKELENKMKKTQEMRKQKIKSILNQIQILKNLRSQDTDIGFCGTN

SEQ ID NO: 293 - protein, 54 aa, Homo sapiens
IPMAPGSDMAQAPPALGGACTGTWGPRGEGPPSSPGSLWPESWGTRRKSPGAPP

SEQ ID NO: 294 - protein, 81 aa, Homo sapiens
RRHQKKPTEHSCLAQTPPIFHSGMLPLEIALTISPFSTVCRESERDYNMDFLTLRHLMWMNMNIMSELKMVTSTGLFQENF

SEQ ID NO: 295 - protein, 57 aa, Homo sapiens
FILCYFYLYPSVGPRKFITFFVKSWLFSNLPVQIPTSMRTWSWPEQFLGWWDPCPQL

SEQ ID NO: 296 - protein, 15 aa, Homo sapiens
KNGLPETEKMPQLMP

SEQ ID NO: 297 - protein, 55 aa, Homo sapiens
CEHKYMRGCVKIIFLLLYYKEIESNCFFSTYWFFFLFFFSFFYFLWILWLITQQV

SEQ ID NO: 298 - protein, 139 aa, Homo sapiens
SIVGFILERNLTSVMSVARPSVRCHPSYTIIGFIVERNLTSVMNVARFLINKHTLHSIREFILERNLTSVMSVARPSVRCQTLYTIIDFIVERNLESVMSVARPSVRCQTLYTIIDFIVERNLKSVMSVATPSITIQPL

SEQ ID NO: 299 - protein, 57 aa, Homo sapiens
SIVGFILERNLTSVMSVARPSVRCHPLYTIIGFIVERSLNSVMSVARPSITIQPCKS

SEQ ID NO: 300 - protein, 244 aa, Homo sapiens
FILKRNHISVMSVARPLGRSQSLHAIIDFILERNLTSVMSVARPLVTSHPLHAIIDFILERNPTNVMSVARPLVTSHPLHAIVDFILERNLTNVKNVTKLTVSDQILKYIGKFILKTMLTSVMSVERPLAGHHPLHAIVDVILESNLTNVKNVTKLSVSNQTLKDIGEFILERNHTSVMSVARPLVGSHTSHAIIDFILERKLTSVMSAARPLVGSHPLPAIVDFILERNLTSVRSVARPSISS

SEQ ID NO: 301 - protein, 55 aa, Homo sapiens
LFIRQYILERNLTNVMNAARFLGTIHTLQLIGEFILERNLTSVMSVGKPLVCIQT

SEQ ID NO: 302 - protein, 55 aa, Homo sapiens
LFIRSSILEKNLTNVMSVARSSGTIHTLQLIGEFILERNLTSVMSVEKPLEDIQT

SEQ ID NO: 303 - protein, 55 aa, Homo sapiens
LPIRSSILEQNLSNAMNAARFSLKIHNLQIIEEFILERNLTSVMSVGKPSVFVQV

SEQ ID NO: 304 - protein, 126 aa, Homo sapiens
NQTLKDIGEFILERNLTSVMSVARPLVGSHILYAIIDFILERNLISVMSVARTLVRSHPLYATIDFILERNLTSVMSVARPLVRSQTLHAIVDFILEKNKCNECGEVFNQQAHLAGHHRIHTGEKP

SEQ ID NO: 305 - protein, 107 aa, Homo sapiens
PIQERENINVMYVARSLIRSNTLYIIIDVTLVRKLTSVMSVGRPSLRCHPLYAIVDFILERNLTSVMSVARPSVRSHPLDAIVDFILERNLTSVMSVARLLVEIQPL

SEQ ID NO: 306 - protein, 335 aa, Homo sapiens
FIRQFILERNLTSVMSVARPSVRNHPFNAIIYFTLERNLTNVKNVTMFTFADHTLKDIGRFILERDHTNVRFVTRFSGVIHTLQNIREFILERNHTSVINVAGVSVGSHPFNTIIHFTLERNLTHVMNVARFLVEEKTLHVIIDFMLERNLTNVKNVTKFSVADHTLKDIGEFILGKNHTNVRFVTRLSGVIHALQTIREFILERNLTSVINVRRFLIKKESLHNIREFILERNLTSVMNVARFLIKKQALQNIREFILQRNLTSVMSVAKPLLDSQHLFTIKQSMGVGKLYKCNDCHKVFSNATTIANHYRIHIEERSTSVINVANFSDVIHNL

SEQ ID NO: 307 - protein, 191 aa, Homo sapiens
FTLERSLTSVMNVARFLINNQLLHAIIDFILQRNHTNVKNVTKFSGANHTLKDIGGFILERNHTNVRFVTRLSGVIHALQNIREFILERNHTCVMNVARFLVQKQTLHVIINFILQRNRTNVKNVRKFSVANHTWKDIGGFILERNRTNVRFVTRLSGGIHTWHNIREFILERNLTSVMSVARPSVRHHRL

SEQ ID NO: 308 - protein, 26 aa, Homo sapiens
DIEEFILERNLTSVMSVGKPLELVQA

SEQ ID NO: 309 - protein, 83 aa, Homo sapiens
LPIRQSILERNLTNVLNVARASLKNHTLEVIGEFILERNLTSVMNVVKSSLKHHNLQGIGEFILEKNLTSVMTVAEPLVIVQA

SEQ ID NO: 310 - protein, 80 aa, Homo sapiens
LPIRQSILEKNLTNAMSVGRSSLRIHTLQDIGEFILERNLTSVMSVAKPLVKLQNLQGIREFIPERNHMSVGNPLVSVQA

SEQ ID NO: 311 - protein, 84 aa, Homo sapiens
DSPNSSLSCFGTWLGWTWNSSALCWVPLTWARDPRGPGQDWPKQRPRRGPPWPGTSSGQGVTAMVGGPPMPMPGQREAPGRQEA

SEQ ID NO: 312 - protein, 36 aa, Homo sapiens
WHWVLLPTGHWRRGQMRLPPVSGSWSLGHPWCCLGL

SEQ ID NO: 313 - protein, 15 aa, Homo sapiens
LYCKKRRKVDGSLRN

SEQ ID NO: 314 - protein, 77 aa, Homo sapiens
PQCQVLKGRKANQNPKGVRVAKTLANPLQGLPCSLQVRGQLARKRCRGAQEMVPMLEAWLLLLLPRAQRRRLRHPAV

SEQ ID NO: 315 - protein, 67 aa, Homo sapiens
SRVLSPVMMQLTRRGQLLRRTILTSPARQWEMGQGVPHRGVQLLLLLPRAQRHCWGRRPLLALVNSL

SEQ ID NO: 316 - protein, 36 aa, Homo sapiens
KSFMHFQMQIDTRQDILERNLSSVKNVANHFACFHN

SEQ ID NO: 317 - protein, 22 aa, Homo sapiens
AILKKNFSNAKNVANHFACFHI

SEQ ID NO: 318 - protein, 22 aa, Homo sapiens
DILKRKLANVKNVANHFACFHN

SEQ ID NO: 319 - protein, 177 aa, Homo sapiens
AGGDRAGRGLAFAVGHRQRVCGSGRRERQRSGVRAAPVYRVREGEQPARLPHLHGVCTGRGRAGERPGVLLAGGAAGGRAPAVELRFGARGERQGVRAAAAGPRGSGAAAVPGERARRGRAASGQQRDAAGVRAGRERQRAGAAGASSGWHRRRSERAGAEVSGCGPRGGEGARSGP

SEQ ID NO: 320 - protein, 157 aa, Homo sapiens
RVRGGGRRERQRPGVRAARVYGVREGEQPAGLPHLHCVGGGRGRAEERAGVLLAGGAAGGRARAVELRVSARGERQGVRAAAVGPRGAGAVAVPGERARCGRAASGQQRDAAGVRAGRERQRAGTAGASGGWHWWRSERACAAVCGRGPCGGEGTCS

SEQ ID NO: 321 - protein, 155 aa, Homo sapiens
TGGDCAGWGFAFSVGHGQGIRGGGRRERQCACVRTARVHRVREGEQPTRLPHLHSVGAGRGRAGERAGVLLAGGAAVGRPRAVELRVGARGERQGVRAAAVGPRGAGAATVPGERARCGRAASEQQRDAAGVRAGRERQRAGTAGDSGWQRGRRS

SEQ ID NO: 322 - protein, 152 aa, Homo sapiens
CERQRSGVRAARVHSVREGEQPAGLPHLHCVCVGRGRAGERAGVLLAGRAAGRGARAVELRFGACGERQGVRAAAAGPRGARAAAVSGDRSRCRRATSGQQRDAAGVRAGRKRQRASTASASGGWHWWRSERAGAMVGGCGPRGGKGARGGC

SEQ ID NO: 323 - protein, 147 aa, Homo sapiens
QCSGVRAARVHSVREGEQPAGLPHLHGVCARRGRAGERAGVLLAGGAAGGRARVVELHFGARGERQGVRAAAAGPRGARAAAVSGERARRGRAASGQQRDAAGVRAGRERQRAGAAGASGGWYWWCSERAGAAVTGCRPSGGEGARS

SEQ ID NO: 324 - protein, 140 aa, Homo sapiens
EGNNINVMYVARSLIRSDTLHAIIDVTLVRNLTSVMNVARFLINNQTLQVIIDFILERNLTNVKNVTKFLVANQILKDIGEFILERNHTNVRFVKRLSGVIHTSHNTLEFTLERNLTSVMSVAKPLVGSQHLFTIKQSMV

SEQ ID NO: 325 - protein, 49 aa, Homo sapiens
EFVTRLLGMIRTWHNMLEFTLERNLTSVMSVAKPLVGSQHLFTVRQSMV

SEQ ID NO: 326 - protein, 27 aa, Homo sapiens
FIGELILERNLTSVMSVARPSITIQPL

SEQ ID NO: 327 - protein, 27 aa, Homo sapiens
FIRQFILERNLTSVMSVARPSVTIQPL

SEQ ID NO: 328 - protein, 80 aa, Homo sapiens
KRNNVNVMYMARYLIRSDTLHAIVDLTLMRNLTSVMSVARSLVTIHPSSFTRRFILQTNLMNVKNVTKFSVANHTLKHIR

SEQ ID NO: 329 - protein, 128 aa, Homo sapiens
RSRLVYTASPGRLCVPSSALPKKLAVSSQKLMLRSSSWLQSSRARSRNNWIRSGNSRRSTLISWQNIGTSSSNNSSSSSNNSNSTQLCWLSALPRVPGCSPSSLVSCSLAMGCSHHRGLRVGKPEVFA

SEQ ID NO: 330 - protein, 153 aa, Homo sapiens
MSSCSKSLRISVEVLLTTRTQPWSPVRATPSLCFILTQIKRTSRCLLFCLPRTSLLSYTTPNSNSSNSSSSSSSSSSSSSNSSSSSNSNSNSNSRVQFQLNNSNSSRAQFQPNSSSSSNNSSSSSNNNSNNSSSSSSNNHLLSLPNLYQASLC

SEQ ID NO: 331 - protein, 19 aa, Homo sapiens
EKKAFRKKSYALSNKNLLI

SEQ ID NO: 332 - protein, 338 aa, Homo sapiens
PSASESDAGYKADPTIPTVVLRSVLPIPGIHCLSFCAPSNAHFTWTCQRHDNPLCRTFQSTLNGTRPDSVQRPAPVPRAALHLRPPHALSRRLHLLPDAGHLGHRHRHVGHGLGHALPHLPAAALPRLVASAGRPVPSQLALLPPVLRRLGRLLPVLHGGRRALAAAHPAALHQRLHRLRAAQPQPPEPERRGGGRGQPQQLPHQHGALRAPGGGRVEALLRRQAWPGWAPRAAAFASGRAGLLFATSPPGSRALGPATVLGPRAPDGQDLAVGQARAASCAQKPTPPPSAGAPALAEVSEATHLEGVRRPQHPGDALESKQEDSRRETVNASDLAML

SEQ ID NO: 333 - protein, 174 aa, Homo sapiens
GPGSGLPPTLRQPGGVPRVKVTGRNCRAATQCVGQRCSAGRPGLPGPPAPKAALPREGALAGAVVPDSAPALGIHPAQEMPPRRSPAAPLYAQCQASGVCGLPGPLAQPPVMEASRHVGAAAPAWLQGTPRAQDPTVRPGTATRSPAQPSAQRTCCSAQQSSVTRRGVLALGYA

SEQ ID NO: 334 - protein, 207 aa, Homo sapiens
SGRATDPTSTPWTGMKPRMGGSCCSSQMCSHHRAASTVPLTWKPAPWAAPSFGSSCGVVGLGAGGQAVPRSAQVAYMEVSATTMTANVYAPLASLAPAVNRPAERAVLGRAARSSAQAYQAAGASPSASQTPMAALVDLAGEEASAKKLVPLVILGLIADSSASVRMVALVTGSVVVSAPLGGMECTVRSQTGSPRSSTWPQNWSST

SEQ ID NO: 335 - protein, 156 aa, Homo sapiens
AGGDRAGRGLASAVGHGQRVCGGGRRERQRACVRAVRVHGVREGEQPARLPHLHGVCVGRGRAGERPGVLLSGGAAVGRALAVELRVGARGERQGVRAAAAGPRGAGAATVPGERARWGRAASGQQLDAAGVRAGRERQRSRAAGVSRWQRGRCSQ

SEQ ID NO: 336 - protein, 105 aa, Homo sapiens
MPSPWPSLAWTTVPPSTSWLLSQKNRGCQRSTGALPRIHNMSKAALRVGPAWTRTDTQARTSQRGTKRNPIRWIPRKREDAKKTTGENWRPSASGKRRKQPRRDA

SEQ ID NO: 337 - protein, 120 aa, Homo sapiens
TLRPLWGPSPMARTAPPLPMPPPPRRPLPPPPRAAQRTVTRGKRLNNRAPLGEATGSRRQGEQNTEDSRKAKPDFWKVQNSFGSLVPEREKMLVPGGTRVCQLILLILCVHAKIGPCYMK

SEQ ID NO: 338 - protein, 132 aa, Homo sapiens
GALSTSLPFRALSPPCRTRPRKAASAQSSRSGGEGGSVLVGMERTASTGETVEMRRWWTLVMEWKSSYRAATPCPAPPRPARVPAHASTSLSSHITLKPVTPQERKTQDVGMAVSMDTISIVTMWGEGGGVG

SEQ ID NO: 339 - protein, 186 aa, Homo sapiens
PSRWSWSRPWNTSQSSLRPLPLLPIRQMHQRALPQRTGTSLHTKQVKQSWLRPSAPSSMTFLGSQKTSQHLHLILENPRQICNPPQVHRRCSLLRKEWRQMRLYLASWKLRLLQNLLGLQSMLLTPQPAQQIPRKPEEIAVKPHTQCQKPKGLKKWKSLLFGKTKGARKQPDHAASETQTRKWWLL

SEQ ID NO: 340 - protein, 236 aa, Homo sapiens
ASGQQEPSAGTARCQPVGEPGCAQRCQWLGRPAPAHVAARIWPARNVGAGRTGDWWLWTAPCRKRSPPATPTVHLLHRVHPSWRLSPSPGLPSGLRCPATVQFWLRASTSTARSVCPSGGSSSTSHSRGSTSGFPTASVSGCPGHEQAPDSSARLPLWSVCRLRAGLEWLRTGLLRPQPAASFLRGSLRARVGGPPRRRQRLWTRAEPQRARVPPLPTLARGAATSARPRPRIPNL

SEQ ID NO: 341 - protein, 235 aa, Homo sapiens
ASGQQEPSAGTARCQPVGEPGCAQRCQWLGRPAPAHVAARIWPARNVGAGRTGDWWLWTAPCRKRSPPATPTVHLLHRVHPSWRLSPSPGLPSGLRCPATVQFWLRASTSTARSVCPSGGSSSTSHSRGSTSGFPTASVSGCPGHEQAPDSSARLPLWSVWLRAGLEWLRTGLLRPQPAASFLRGSLRARVGGPPRRRQRLWTRAEPQRARVPPLPTLARGAATSARPRPRIPNL

SEQ ID NO: 342 - protein, 81 aa, Homo sapiens
AVMWPSRLRAGLEWLRTGLLRPQPAASFLRGSLRARVGGPPRRRQRLWTRAEPQRARVPPLPTLARGAATSARPRPRIPNL

SEQ ID NO: 343 - protein, 140 aa, Homo sapiens
RSSYGGSHSSTKLQCRSGIPPKTPEVTLGSMEGSGDHGIKRKPRKRSQAKIRLRKSKRKAKKRRRNSRKQSQVNQQIWLDNIAGLSVRLVFMLCHSRDFCHLAATLKTVLLSAKVLLLQATLRESGDVYFSCSFRKRGES

SEQ ID NO: 344 - protein, 68 aa, Homo sapiens
VNQQIWLDNIAGLSVRLVFMLCHSRDFCHLAATLKTVLLSAKVLLLQATLRESGDVYFSCSFRKRGES

SEQ ID NO: 345 - protein, 202 aa, Homo sapiens
LPTTCWRTSSSTAGWAGGSGHGRGHWGPWTWGVPLPRSLLRQPVQLRTEPARSSCISTASTTESTPTASSAMAVTRSSRGCWPAPSRPTASTPAGRGAFPPKCCSGMCTSHHAPWPSGPRTSTAVPGSACQGAVTPTSAEIWFLGSSASPPAPSPDALSMGSSSPQWLGTLWPSLPSSTLWTFCGLRWGCPWPPCSSWRQPQ

SEQ ID NO: 346 - protein, 33 aa, Homo sapiens
SACQWGGPRAETAQACSTPSHPATFPSSTSSQH

SEQ ID NO: 347 - protein, 211 aa, Homo sapiens
ETLVQWERRASLAKQVSLAFREKAAPRDPKEKGERRASQALQVLPDPLDPKALPEMMVPKAALAQWVFLEILAPPESLAPRVKMVPLVTKEMMVNPGRRDPPALLVNQVHRGLQEKGVPQAPQAPKADRERKGPREKPAWKALLGRLAPSAPRGPLGSPDRMAFEGSLALWENKVSQDPQARTVPPAPWVPQDFPASKEILVPKVKRVIQA

SEQ ID NO: 348 - protein, 41 aa, Homo sapiens
RAAKNKKRRRIHGQYIHCHAKETWNCWAEAWWCRCPLSYQA

SEQ ID NO: 349 - protein, 38 aa, Homo sapiens
IASWVSYLYLFPLDTVLASMLSGVFLMAFEQNLPHTQV

SEQ ID NO: 350 - protein, 34 aa, Homo sapiens
PTLVPMKRLPKLFSRSLVEVFLMAFEQNLPHTQV

SEQ ID NO: 351 - protein, 65 aa, Homo sapiens
DGEKKSSKDKNLALLREHLVGGRLFYMWISLEKQASNAFFSQEEQRCYLVILYLYLKRPHIFFLT

SEQ ID NO: 352 - protein, 111 aa, Homo sapiens
PGADGRQAGGAPQALGLQEPLRPGGPRRVNPGLGEALQRHGRGEPAQVEFRFSESQTPRGQVRVARGGEGQLARVLLQTPAAPQRCLQGAGAGEPGCQREPPGGAFNWGSG

SEQ ID NO: 353 - protein, 107 aa, Homo sapiens
LTPASRRCAASSGEPRAHSVLIWSHHCHPLPCLSCALGVPHPRPLRTQHASWPWPWLSGLSRWPSNRASRSVGAPHLLPNPPSTARCLWRWAGSPWGPQGVGHLPTP

SEQ ID NO: 354 - protein, 97 aa, Homo sapiens
SPAWAQLPQSHPLPTASGLKNIPGIRGALTTRPSESPPAWNLAISNLLPSASWIKLETAGTPGMSLPILPCLCSFLDLTYYFFCFCFHPSCLSCPEG

SEQ ID NO: 355 - protein, 90 aa, Homo sapiens
RPRSAPAACTKRPSTPPSICSCITHPPREQGSTPSRSPRCTRPISPPTVSPNSLSTNISTAHIPPLHLRTSARSKFTGLCRPLTSLASTP

SEQ ID NO: 356 - protein, 82 aa, Homo sapiens
CTKRPSTPPSICSCITHPPREQGSTPSRSPRCTRPISPPTVSPNSLSTNISTAHIPPLHLRTSARSKFTGLCRPLTSLASTP

SEQ ID NO: 357 - protein, 120 aa, Homo sapiens
RQPSPAFPWGPLRQVPLGGLALHPGSLWSLAQSESQLPQSLSLRGSPHHQPLHPCQRPGLPRPGAAPHCPHLLRSGPAPRALRPWPANSPAHLQTGASLGRAWRIVGSLPLLPARPQLQL

SEQ ID NO: 358 - protein, 44 aa, Homo sapiens
KEGRKRRCPQSLPLSPWPAHTLEWETHRITWDRCKRVQVATLLH

SEQ ID NO: 359 - protein, 29 aa, Homo sapiens
LSGAWAPPARAIATRPGGWNRMGEPRGFC

SEQ ID NO: 360 - protein, 54 aa, Homo sapiens
VVTMGILCISCRMGPPRALQTSTTRYEGSSHVAILNPALLGVLLQFNSWFEGHL

SEQ ID NO: 361 - protein, 80 aa, Homo sapiens
DSGHTGKIRKKRIMKGFRTKWKPVTNLTKEHLIWLITLFLKCLLMTRSNTFQLSFDFILEKLAKEWKNILVMSCFQFSDE

SEQ ID NO: 362 - protein, 41 aa, Homo sapiens
VRLGPGFFYRCICLPAKRPARSRLVPLGSLGVFTCSWTGPR

SEQ ID NO: 363 - protein, 57 aa, Homo sapiens
LLQIKKRKKKRKRKREKRSQKSRQNHLQLKSCRRKISNWSLKKVPALKKLRSPLWIF

SEQ ID NO: 364 - protein, 84 aa, Homo sapiens
LLQIFPPLMLLFSLWYPLLLCKLLLTKINWRKKRKKKRKRKREKRSQKSRQNHLQLKSCRRKISNWSLKKVPALKKLRSPLWIF

SEQ ID NO: 365 - protein, 110 aa, Homo sapiens
TCPSTSVCCSRCETLLINEATRKSGSGKMGVFLPVVLLVHMVLLYQNPYKHHGNCSHYNCSFLLSFGRFKVYEQCQILIPGGTCLHNSSHSCHSVDTFALQTFLSRTKKA

SEQ ID NO: 366 - protein, 53 aa, Homo sapiens
LASESFSRHHALITPRLMRKLPKKYSANLRNQTQRTPQQTQSNGPREASRKQT

SEQ ID NO: 367 - protein, 161 aa, Homo sapiens
CHHHHHLPPHPSPQIPASLYSAWSKNRCCPGWAACGLPWTRTACPRWWRPTRSWSMCGRTSPASSLRSSSAFPHPTRPSTTTSASRRARASETSSTVTLGTSPPWISDRAWRDQGFQRCSPCLCSPGAPCPWPSSQPVWKHLIYTPLLCLQKLLALGSGYR

SEQ ID NO: 368 - protein, 113 aa, Homo sapiens
PCPWTRWRRCCRSARSCTSPRSPSSACSSSTTRSRCRTTSRCARSPRCTAWRRPRSWPTSTWWRMCCCSTSRRCAPCWTRCRPPWSRSWRSSRCPCCGWSTTARPACSMRLTS

SEQ ID NO: 369 - protein, 62 aa, Homo sapiens
EYLPFLQTWQESLGGNLHTPSTLLQTVRCSLSLFPPTPSSDPESPGMLARSTPSTTGRWCAL

SEQ ID NO: 370 - protein, 79 aa, Homo sapiens
AHQGFPAAKESRVIQLSLLSLLIPPLTCLASEALPRPLLALPPVLLSLAQDHSRLLQCQATRCHLGHPVASRTASCILP

SEQ ID NO: 371 - protein, 92 aa, Homo sapiens
MTERGPRRSGGGGNGSQNPVASPPGKPLWKRGTQGERSILGWRLKRPRVKLSDARSARERGSSSRAWSVRGFLWGPVSWIWGRAQCMMWRSW

SEQ ID NO: 372 - protein, 73 aa, Homo sapiens
TCSTQTSLRNPPRRPRAASLPQTCSRSPRPSRAHSLTGRPPRFQSQMPSRSPCCTCTWTGPGCPIYFLCPWRL

SEQ ID NO: 373 - protein, 23 aa, Homo sapiens
GQKKGQHFYWHCGSAACHRRGCV

SEQ ID NO: 374 - protein, 140 aa, Homo sapiens
RCPPPRSTPRTPAAAPWPHAPSPATRWAAWTVSGVALAGPVGASQRTAAPEDPLPSPGDTPAPSSAWWGLGLGQRRPPARKQAHRSQPQRAESPAGRFLRRSPGEALTPSSLSPSMSPAPQAPLLEGGTCLFSASLGGPE

SEQ ID NO: 375 - protein, 66 aa, Homo sapiens
MKVQDRYCMKSWNSRLCPLQRLGSSVSSMRAPLSWQQQIPLSLSGILKKQPLKTSSCLILYYQGLI

SEQ ID NO: 376 - protein, 85 aa, Homo sapiens
TWNLERIYWNPRLPQLEDGPPLALLHPREPWTCLIPLLAWKKTLESWMEPLSCWGWGGCSIKPPLPRRWTTVLREPWHGMQEIRP

SEQ ID NO: 377 - protein, 18 aa, Homo sapiens
PTTGGKKDTQIPRTSRWC

SEQ ID NO: 378 - protein, 31 aa, Homo sapiens
SDFFMYFFLLHFLEKSPLEEWNQWVMHLCWH

SEQ ID NO: 379 - protein, 214 aa, Homo sapiens
GLMSVVNVGKHLVAISTLFTTKDFTLEKDLMCAVNVGNHLARNLSSFNTKEFTLEKGLMSAVNVGKFLAKALASFDTEELTLKQSLMSAVNVKNHLVAKLTSFDTRQFTLEKGLMSAVYVGNLLSEKPTSFDTRLFTLMKGLMSAMNVGNPIAKALPSFSIGEFTLEKGLMSAENVGNLLPAKITSFNTRQFTLEKGLMNAVNVENPLAKALAS

SEQ ID NO: 380 - protein, 186 aa, Homo sapiens
DLMNVMNVENYLAGNLTSLYMREFTQEKGHMSAVNVENPLPVNPTSSHTGKFILEQGLMNVGSVGNHLLIALRSFNTREFTLEKGLMSAMNVGSFLARAPASLDIGEVTPEKGLMSAVSVGNPLVTTLASLNTEEFIPEKGLMNAVNVENPLARALTSLITSEFTVGKGLMSVVTVENFLPSTPTS

SEQ ID NO: 381 - protein, 322 aa, Homo sapiens
APNTHLWNTREPIMEKSLMCAMYVGNHSATNKHLLAISRESTLERGLMCVWNVGNLLFIPMTAFDTREFTLEKGLISAVNVGNPSYTNSHFLITIESTREKGLMSAKNVGRPSFTKKDFLSTREFILEKSLMCASYVGNHLSARLTTCDTREFTLEKGLMNAVTVGKPSSPNKHFLSITKSTLEKGLMNAVNVEKASTLRLNFFSTKESILENNFVSAMNVEKSSATKKDFLSTRKFTLAKSPVSAVNVGNALDTAPASFNTRKFTVERGLITALHVRRPLSIKTNLLSISESTPEKSRMNVVNVGKPSTKDIPLSGTRRYI

SEQ ID NO: 382 - protein, 71 aa, Homo sapiens
VPAPPVSSRHPGDLWMKTPPNPQRWRSHLSCDLPLPPPHLFPRSQHQSPLHHVPQLLHLPQFHSLRRDGPS

SEQ ID NO: 383 - protein, 26 aa, Homo sapiens
YFITFCHGKYSRWIFLFIQPECSEPR

SEQ ID NO: 384 - protein, 141 aa, Homo sapiens
QNLVIQVVPVEATLYPVFMQGSHLRNMPQDTTDHICILLIVASQHLHFLHLIRLLCIALGYYSPHHHLLRHQPWSQATMGLLTSPVTAIRLLAILLRLLWGLGTALGGHRLRLQRTCLQEFLLPPPYPPPLFLATPTRAMV

SEQ ID NO: 385 - protein, 40 aa, Homo sapiens
KLPRGSSNKNVLCCQSEKCNEHAKPAKKRRGRTARAARRN

SEQ ID NO: 386 - protein, 249 aa, Homo sapiens
ESPGPLHEDDRRAGEGPVRRPQPHHVRGLRGLALPVGLRLGHREHAAPGEHVPQGRARSEEGERGGQVPRVHPRGGQPGAQRLRLDAGAHAGARQRLQQEQAARQAAHERLHGVGAGGAQEARGPVPALAQRRAQQDAGQALETSEREREAALRGGGGAAARAAQEGPPGLQVPAAAEEVGEERAGGGRGGHGADAHLPQRHLQGAAGRLATLLLRHERGALPRRALGAIPGPTDPTHHPQNRRAAGQG

SEQ ID NO: 387 - protein, 35 aa, Homo sapiens
GRAWCPGAPLPPPGLGCLPRAGPPHPSLGSPGKCV

SEQ ID NO: 388 - protein, 55 aa, Homo sapiens
FILKRNPTNVKNVAKPLSSLQSLLTIREFILERNPINVKNVANLLTGLQLLLNIR

SEQ ID NO: 389 - protein, 50 aa, Homo sapiens
FILERNLTSVKNVAKHLSGPQPLLNIREFILERNPTNVKNVARHLYGPQP

SEQ ID NO: 390 - protein, 186 aa, Homo sapiens
ERSFLNVMNVTKPSPIAHPLLFILEFILVKNHMHVRNVEKPSSKGNTLLNITEHILERNSLNVKNVGKPSNKVNTLFSIKEFILEKNHINVRNAEKPSDSLHTLLSIREFILERNPMNVKNVAKPSVMARLLLDIRDVTLAKDPMNVLSVGRLLGITHLLFVTGGVIILERSLLIALIVGKPSVFT

SEQ ID NO: 391 - protein, 24 aa, Homo sapiens
KEKLHIFLKKSRRKKKMVLICPLS

SEQ ID NO: 392 - protein, 86 aa, Homo sapiens
VMNYVTQNVHPKYKKLKVNHEVLKNLVVQILSVWKTVKKMWHSVIHASCSAKNILAVEESHLQPTELLIGKKPWKNSESMKKVKCI

SEQ ID NO: 393 - protein, 99 aa, Homo sapiens
TMQDLKKYKKKKQKRMKSRKVRKPTENQEKNIRKRERRKNPKGENVRNISIIPHLVMIVRTTALIQMLNIQKVPIKKELVSTGIMTFHLLSVDIYQEAT

SEQ ID NO: 394 - protein, 32 aa, Homo sapiens
KWLGGVSLALTLDMDHTILKKKPGTSLQCYLN

SEQ ID NO: 395 - protein, 87 aa, Homo sapiens
PLLTITPPPSPSLSTWRMSTAAGGAALPTGCGSCPPCPEASPLCSTRRCSTTGSPPPSNTSLIPGTRMSGKAPTGPPQSGEPLASRS

SEQ ID NO: 396 - protein, 203 aa, Homo sapiens
RVIREFTLEKDLLNAAFVGNPLDVAPHLIHIREFTLVKGLMSVVNVGNSLGTTQIILDIGEITLEKGLLSALSVGEFLAKIPTSFGTKKFTLGKELTNAANVGNFLWTAPHSLVMREFILEKSLMSAVNVGKSLDTTPASLNIGEFTLERDLISAVNVEESLTKILISFSTRKFTPDKECIYKADGERLHTEIYSDLALGPTF

SEQ ID NO: 397 - protein, 320 aa, Homo sapiens [sequence omitted]

SEQ ID NO: 398 - protein, 56 aa, Homo sapiens
TLNTYLLNTREPIMQKSLMCAIYVGNHSSINKHSLGTSREFTLEKGLMCASNVGNP

SEQ ID NO: 399 - protein, 238 aa, Homo sapiens
DISEFTLEKGLMSATHVGNSFGTAPHLLDIREFTPEKGRMSAGNVGNSLWTAPHSLNIREFTPEKDLISAMIVGNFLGISPHSLDIREFTLEKGLMSAVYVGNCLGTTPALLNIGEITLEKGLINAVNVGNHLGTTAGSLDTRESTREKGLMSAANAGNSFVTTPTSLNIGEITLEKGLTSAESVGKPLATSIYLLSTRKSTVEKDLMSAANARRPLLESLTWFITRKSTVKRGLCAP

SEQ ID NO: 400 - protein, 441 aa, Homo sapiens
NLSVISAALFTISEFTVEKDLISVENVGNLSVKRATSFYTSEFTLEQDLMSVENVGNHLVQKDILGTISKFTLGTDFMSVESVGNLLVIKAPSFYISEFTLEKDLMGVENVGNLLVQSGTLGAISAFILERGLMSVENVGNLLVISAALFTISACTLEKDLTSVETVGNLLMKKDTLGIISEFTLQKDLLSVGNVGNVLVTRVTSFYTSMAILEKDLMYVGNVENYLRRSLTSLYTREFTMEKSHMLVKLVRNFLETSTNSLHIREFTLEKGLMNAMIVENHLPTALHSVFISEFTLEKSLMSAVNVENLSLKAPVSQNTKEFTLEKSLMSAVNVENLLLKAPVSLNTREFTLEKSLINVRNVGNYLTRSLTSLYTRVHTGEKPYECEDCQKVFSKKDHLIAHQRVHTGERPYECSDCGKSSTHSSAFCVHKRVHTGHTTL

SEQ ID NO: 401 - protein, 198 aa, Homo sapiens
VFTVVRNPLNATNAGSLLGSFLYLKPIRIFIALRNPTNVRNVARPFVMPQASYIMTELMLVKSPMNVKNVGKLLVMLHILLFMREFIPVINPMNVKDVGRHFTVPHILLDMKAFMLMEIPICVKSVGKLLIVAMNLVYIIEFILVRNPLNVTNAEGPLGLDPSLKYIREFIFDREIVAYTGSKESTLCQWIYPTEQFE

SEQ ID NO: 402 - protein, 437 aa, Homo sapiens
SAMGKCSFIGNTHVLLSIREFIMDRNHMSVSNVRSPLVILQNSWYIKQFILVRNLINVKSLGRHLAILQTLESIRKLMLVRNLMNVKNVGRSSVILQTLLNMGKFMLRNPMNVKSVGKLLGLAVNLLYIIDFIMVRNPTNVRNVARPLVCMDDLVDIRVFTLVRSPLNVTNVGSPLGSKQALKYIRVFILERSHMNVRNVERPFVSFPTLWVIKEFILEKNPMNARNAGRALHVGINLPCIREFIQGRNTMNVKKMGRLLVVAINLLHLIHLKVLRNLISVRNVGKPLVCMDDLLDIRVFIVVRNPMNVTNVGSPLGSIHPLKYIKIFIPVRNPTNVRNVGRPSVSVHTLPIITEFILVTNPLNVKNVGSPFVVPHILLYMREFIQERNPMYVKSVGRVLVIAINSLYIAEFILVRNLMNVRNVGRPLVYLDNLLSI

SEQ ID NO: 403 - protein, 52 aa, Homo sapiens
RTCPMVTLPPPGALRPPHLRTTAAVVLLSSPSATRFCHLVAPSPHSEDPQAP

SEQ ID NO: 404 - protein, 57 aa, Homo sapiens
TATAAPTWSSSGPPITTSRPEGARCLCVPCPGGGEGGGVMLFSTGSRATPGVALGRL

SEQ ID NO: 405 - protein, 92 aa, Homo sapiens
RCSGRTLACGSPTLMSRAPRSAPTSGPPSAPWTWTATAAPTWSSSGPPITTSRPEGARCPCAPCPGGRGLGGSVMLFSTGSRANPGAALGQP

SEQ ID NO: 406 - protein, 91 aa, Homo sapiens
RCSGRTLACGSPTLMSRAPRSAPTSGPPSAPWTWTATAAPTWSSSGPPITTSRPEGARCPCAPCPGGGLGGSVMLFSTGSRANPGAALGQP

SEQ ID NO: 407 - protein, 222 aa, Homo sapiens
SPCPRNSGNPLRSEKGEEGAGKEEEPAAAPGKGRGALRSRRRPGAGEGKAYALSRGAAAAGRGPPLLHPPLLRAKPQEPAAETPEAALRGAAAVVEGATGKKDVCSLSSSSSISRRSGRQRRRPRLRCTLRTAAAAVAAAPRCLAPLPFARPWPSPPPPQWRRRRRAPSRAQRAARAAGACRRQRPLRRSRTRSSSKSRKKCKRRWRSCERKTRLSRTRSMS

SEQ ID NO: 408 - protein, 295 aa, Homo sapiens
RRTTASACSAAMASMRAGGSVSRSVPRSVSMAVVWHPISANVCQAGGATTVPVSVPQECGGHSVTSPAAAATTARVIPRVGYVLALLVCSPRTAFSPVPLATMALPASSAASAMGHPAIPRLEPASAPQRELGPAVTCPVPRALLASSAPAPILAKMEVSSKPHRAPAAAPLAGWAPSAPCPAQRAFTDPTAPRNVAATTAASVTDSLGSAAALRVTLGIGAGRSARWAALGRTVLRRATAPRTPVASRPTAHVCANTASLGTAARIASAPTASTVSAARPPAPATGSTASAATR

SEQ ID NO: 409 - protein, 247 aa, Homo sapiens
SYCDPCPGRLGHAEQAVPHGHRDQGVGHCVLRPPAPVHGSPSEVLHRAAQKDLERRRHAHPGPAVLLQIRAGGGQRGAHVPAPEEHVCGPAAGGGHPARQDARVRRGQARGRHGAGDGHAVRADEERAEDHATDPVQPLPEDQRQAGRREQHPAAPGQAAGVPAARHLSGSRRHSPPRRGWEEALHCRRGGQHGRPPQSLLRHRARAAAPAGDHTRPGRHGPRAPHPVLQVHALQAHPHHLLPRRCL

SEQ ID NO: 410 - protein, 305 aa, Homo sapiens
SSGRCCAAPPCSPRWALAATCSRREAQDASAGSPRQHPPRQRPRPARPSRPLPRSSASRSRRPTPRPLLHPCCWTWVSLWASGQPRAPDVRRSPAEALSHPHRGHHALLLAPQAPHVHHPWASSADLGPRPFAAALIPGALCQLGHGLLPCHHHSLHPAEHPGPCSRTQTPSGTPHLPTPSRGAPRTAGHRPKTWVPRPRGCRKRGLEWARPLPRAPAALGGVTAYTGTGAGSASAAASVSPGTPPPFGGQEHYTAQEAFTLEGGPAPPHLKPVGPPSSPALLGPNTVPSWLGGPEPVSGNCLLG

SEQ ID NO: 411 - protein, 52 aa, Homo sapiens
RKPPRRKRPAGTPPTPTSRPASRPPAACGPWCPQRPGPPAPSCPTGTSCAAS

SEQ ID NO: 412 - protein, 242 aa, Homo sapiens
ALGFQYAGSGEDGRARAVRLEQLLCRARGLLLREQHERRPGDERHEHVHEHVGGRHGQRLGQHERGLHEHVVVRGRWHEPVPGGDVPRRGRHGGHGRLGRGGRRGGHGAALESQPEPARGAGGRGHGRPGPLRQHELHEPHVRAGGPEPRPRPQDLQAQLHARKAALLVHLAHHHGHPAEPQQDADAERDLPVDHGPLPLLPAEPAALAELHPPLALLQRLFPEGAPLARQARQGLLLDPAP

SEQ ID NO: 413 - protein, 236 aa, Homo sapiens
AGSGEDGRARAVRLEQLLCRARGLLLREQHERRPGDERHEHVHEHVGGRHGQRLGQHERGLHEHVVVRGRWHEPVPGGDVPRRGRHGGHGRLGRGGRRGGHGAALESQPEPARGAGGRGHGRPGPLRQHELHEPHVRAGGPEPRPRPQDLQAQLHARKAALLVHLAHHHGHPAEPQQDADAERDLPVDHGPLPLLPAEPAALAELHPPLALLQRLFPEGAPLARQARQGLLLDPAP

SEQ ID NO: 414 - protein, 214 aa, Homo sapiens
NQRLEQLLRRHAGGLLLRPGQQHELRPGLHELHEHLHDHEHHDYERQHDPGVLQHVLCQPGPRGRPESRRSSRHAGGLGGRHEQHDCGRRDGHGYGAEPERHGRHGCAAGGLHEWPGPLRGRHEPVHEPHGVRAVQPGPQPRGRRRRRQDVQAQLPARQAALLVHLAHHHGHPAGAQQDAHAERDLPVDHGPLPLLPAEPAALAELHPPLAVLQ

SEQ ID NO: 415 - protein, 103 aa, Homo sapiens
AATSSPTSRPSMSTSLTSTCRPTATRGCRPRTARSPTRAATASAAPRPPRRARATCGCPSSRRRRHPRSSPHRPRRPRRRPRSRRRRPHSSRRHPRSSHRRTR

SEQ ID NO: 416 - protein, 42 aa, Homo sapiens
SHHGRPPHPAARSSSCCPASPHSPGASPMSLSWGTALMTSPR

SEQ ID NO: 417 - protein, 36 aa, Homo sapiens
PTPWGGTRKASAASCASGVTTSTHRPASAWTSMHQT

SEQ ID NO: 418 - protein, 129 aa, Homo sapiens
RATAAMRTTVPSTTRVSMGPPCPRDHLPALFTQPLWTAASLFPPCYGFCEAHFPFSPADEEPAPSVPTCLGSWGFSDHWCALMYIFSSSLGRRETGNVPGLLKRRPSWLHFLRRFALYPKPLSSITLNA

SEQ ID NO: 419 - protein, 259 aa, Homo sapiens
PRTCAEHQTGRKGRQEDLADGGGQASRGSKGSRGPLASGQASKALKETRGNLGPLETPARWATQGPAAPSEPVASRELKAPRAAQETSRTSRGQPSPPFGGTPQWGATWSSSTRSSPTRKNRTRTTPADSSALYPATTTSPSRCCPSGKSACPSSPPQGARSDAPWASVTPPTRGSSRWCQGAWCFSCSRVTRSGLKKTPKRVTFTRALRPTASSAASSSSHLPEPGKDPLPHPPLWLPCSACKMGALLLQLLKGGGWL

SEQ ID NO: 420 - protein, 302 aa, Homo sapiens
RLRDPFRTARLGAVHLRTVCWGSAAPLARGPERGPPGGPAPGAPGPAELQGGGPTAALHPVWARWEATAPRTLRPASCESALRGWPLQVCAQLHGGHGGHPHAALGGGRDPGPPGWRPDEGAPAEAARICVRLVRRPRPQVLATEYPAAKRSPSQCGVAPIPGSCLCAVETAGTRDPRIRAASRGSLSSIPGQGSGCLLTPGGPPSVCTLPQIRGCRLQGGGAALVHRAERVDTRQLCHLVGGSLRGERRLPQECACCCGPREADALRALPEAWRHGGLLPVLLPQQLPLHVCPGQLLHLPG

SEQ ID NO: 421 - protein, 51 aa, Homo sapiens
MRAVTSMLSTTMGTPPCTSQLGRATMTACCYSCHVGPTLSCGTKRGTQHGT

SEQ ID NO: 422 - protein, 81 aa, Homo sapiens
VDHTSVRLLRCRLLVQDREIPGQPQPEQHAGQEGGGDACGRRPQLGLRAGIPPTALGQQPACTRPPRAQPRQLLAQVPGRR

SEQ ID NO: 423 - protein, 156 aa, Homo sapiens
RSPGRRGRRRCQRSKRRRSRKRGESAAGGQRQSKPRRHYRPMSRPVTSSSSGATSPTPLGLPVARPRRSQGKGQGSHEGHYLFQRRRKKQRHSVRPRIRRTLSPVKNVAGKVGSAVPAGTPAGWCAEGAGVGWRGGGRGTGGVRLVSGWLSGFLGL

SEQ ID NO: 424 - protein, 43 aa, Homo sapiens
PEARGAPLARGGQTAPYRLPRRGHRRAEQRRHLQHRDLRCQRV

SEQ ID NO: 425 - protein, 106 aa, Homo sapiens
WTQVRRGTATVGGMAILQVTAGHPLAMAQGPAGHPPTMVQGPAGHPLAMAQGPAGHPPTMVQGPAGLPLAMAQVTHPLVHITEEVEENRTQDGKPERIAQLTWNEA

SEQ ID NO: 426 - protein, 51 aa, Homo sapiens
VSCWAGAFAPPSLAVGSRPGGWRAQALLAGSRTPIPTGSRRNGSCRRWRAP

SEQ ID NO: 427 - protein, 65 aa, Homo sapiens
SRAVILMRATPSRARRPCRHARQRCLQSGTFLPRPRVSVCPPTATCLAILTGTPLHTRTRCRDHR

SEQ ID NO: 428 - protein, 42 aa, Homo sapiens
TMSSKPPGGDPTPARRTKKQSSATYVSLVSSAISLLVNSWRD

SEQ ID NO: 429 - protein, 58 aa, Homo sapiens
QCSSSKVILFLCPRYAKVIRERVGSRFVTSSHRVQDSTSVTTSPEGTVVFPTASGPIT

SEQ ID NO: 430 - protein, 156 aa, Homo sapiens
TRPRATHAIAATATTTTHSGWSASTMTSAPMRNRPVRAAAVSTLWALITVPASPHWCWMARSAAASPTRARASMTIWECAGRKWGLTSCAATLGWTVRPPTQSAAACMERPGAWTAPSALRRTQMTSRPCAMCYAPPHIAPRDQVALDSPTSTAQT

SEQ ID NO: 431 - protein, 92 aa, Homo sapiens
WLWHGPLPRRLDSLLARLGSASSLLRLARHPKVGHGAPGPHCHRQVWGACRGQDPPTLPWGALESVCECAQLQARGVDGEDQRWIRGGVWQT

SEQ ID NO: 432 - protein, 103 aa, Homo sapiens
VVTGTPLEVVEARDHFPLVALLWDTETTGCSSWLLAACPLHLRHHCLETWREKETTRSMRECALHTVLSQGWELEQVLLLSEKWMRFHPRMISELTGRSSWAT

SEQ ID NO: 433 - protein, 59 aa, Homo sapiens
QRMMKSSSSPIAQSTAHIGNPRRVLARGLHRRMGPLSVPPGIRWSPLPALSRTGRRPTG

SEQ ID NO: 434 - protein, 293 aa, Homo sapiens
TPSKPTSPMPRRSQPLPSLSQMDSLPSTRSFSTALPGKTSRKTWSCKPGEPTGAWDRSQPSTGHHPARAQLRKPPSVPSLLWKAQLGLLHLFQSASTDSRGQTTPRRPRHWLYTTPLPRPCLSTPSRPSTLLATPGKPAHLSFHQSFHIKSHLQRGLGPFPLTCTPQSQSTRLTFTQSTGWPPSTRLTCWLGARLSVTHPCCQSTEPKTRDTSCLTRGRSLSTWLHLQPHTITTGFSSNIPLTCRFLTDFTGQSLHFPPMVSDSHLSLASPEIRALTCLKKPPWSIQPRVLPG

SEQ ID NO: 435 - protein, 173 aa, Homo sapiens
RGLNPMPSTCSLVPSALTPWVLCLISRTARDGSSPLATSAPVCTGAQWMLGGAAGIGAEFWSIGHGGRGKSQLTWRLQRRTRPLCTAPPLPQSPQVVRTPHWTQMFLSLELLSATRPFRTWTLHCGQIQAAPLLQPPVLFRGLESKCPTTRHPGGPWGVSPLAPCPPLEVHLH

SEQ ID NO: 436 - protein, 61 aa, Homo sapiens
GLRAPPTSLRREKDGSTSGGSPSGPKSLRPPVWAPPTPSPTTRVWPSRRQPCAHGLWLGSI

SEQ ID NO: 437 - protein, 31 aa, Homo sapiens
CQIGCTYQWATMAVPPLSWCLAPQSEGPWDR

SEQ ID NO: 438 - protein, 48 aa, Homo sapiens
GLARGQGLQWMSTRTTSSFPVGDPPTWKSCTLRPRRGSAPYNTKRNRN

SEQ ID NO: 439 - protein, 65 aa, Homo sapiens
LQEGGSQAREAETRPAPKAEQRVLGLSRGQEEQARAQRHPPVGVHPGHPHPPGAQRGPHEVGESA

SEQ ID NO: 440 - protein, 182 aa, Homo sapiens
ATTTPPCSTGSTRTRTTRASATPTWTRRSTRCRRRWMCFLTSTVKATTSRPTTETRSGPRCRGTLRPTTGARCAARLCFMDPYPGWTAAKPWAATTPPPPGISAPSPRRPSTTAPRGPSPSTPRPRPPPCRGATPARTSSPSRPPRRRTSPRTHRCPPQARPARPGRTRKSASSTRCPCPTA

SEQ ID NO: 441 - protein, 125 aa, Homo sapiens
SLIGTVCVSGTWPTTRSPLWSMETVPLSCSSTTWETTSPMAGLLREAVASATRTGGHSRGGSLPPGCFWPCLWNSLLRFCPASCSGCYSWTIPPTGSPFSCTTTRSSMNPTSLTPGRSSRTTSQL

SEQ ID NO: 442 - protein, 46 aa, Homo sapiens
MACLPGPLCLDLIQPPWGVPTPMCWAWCRLPASLEMKLALSRGESR

SEQ ID NO: 443 - protein, 44 aa, Homo sapiens
CRTSMSRPPCPRSSAPAARAGGMASPRLHLRDWLLGWKQGKAWR

SEQ ID NO: 444 - protein, 90 aa, Homo sapiens
WSRSATGACRACPGSTPSTATSATGRTSTTERGMRSRRGPRRAQRPCRTSMSRPPCPRSSAPAARAGGMASPRLHLRDWLLGWKQGKAWR

SEQ ID NO: 445 - protein, 151 aa, Homo sapiens
SPGGGGRSGGPATWSSGRPRPRAARARPSPRRRPPGASTCPRGGAAGSCGCPSGTRPATARRRETATAAGTAPTARTTSPQTSATGRTSTTERGMRSRRGPRRAQRPCRTSMSRPPCPRSSAPAARAGGMASPRLHLRDWLLGWKQGKAWR

SEQ ID NO: 446 - protein, 34 aa, Homo sapiens
EKHSSISLGRKDKQRKRKEKTIIASRMLTLVETI

SEQ ID NO: 447 - protein, 17 aa, Homo sapiens
QKKKASSPATMWPNSTP

SEQ ID NO: 448 - protein, 65 aa, Homo sapiens
TAATLQSVPLSGSRMGYASKPRLVCCTCPRQPGAMLASTPAKLRTAWALWSHPPSASTSSWLRSR

SEQ ID NO: 449 - protein, 125 aa, Homo sapiens
LTAWSTCIARALCTRTSSRGTCCSPPVAPSKSPTWAWPRHCTRSRRTTPAGPARAPRLSSRPRLPTAWTPSPASRWTSGRLGSPSTTSPRVCTPSKGTTSTSCLRTSGRGATPSRATVAPRSLTC

SEQ ID NO: 450 - protein, 45 aa, Homo sapiens
GGDLPRMLPISSPLHRPQMPFWTCTFPATTWGTWETPSTWGWRTF

SEQ ID NO: 451 - protein, 49 aa, Homo sapiens
CGHDAAGCPRAACLGQGGREPLRVYSVRITAVGHLGITVDELIGFTSHL

SEQ ID NO: 452 - protein, 63 aa, Homo sapiens
KVEMMILKRWEKKIVRSLNLLLYLSFRPPWPVSWTSCPTHPHSLPQSLPKAVQRRKAPNGKST

SEQ ID NO: 453 - protein, 36 aa, Homo sapiens
KVEMMILKRWEKKIVSLPQSLPKAVQRRKAPNGKST

SEQ ID NO: 454 - protein, 274 aa, Homo sapiens
SALLSMRSPLSSNNWKTSWAEKSVSHPGKPHPGYNLLPPARTGSREAGSQNPSGLVPRSPWPGRAGSHQTMSSVRVLERPRPGIKAYGMSQGGGPAGVSTPRRDPRGQPPKSTVMTQTSLTSPPTESALLVGGGAQGRMLAAVVMGTTSQPAEKTPGLPGRRHGQGGAVSRSTHFTSHGAPSVPSTAPTGDASPTRSSRGTSWMSSCSKRAAGTATCPPPRRGSSQGCREGRMATLERQTLGVTLKSPSCLMDSAWSLTSSLPGGTDTMSASTE

SEQ ID NO: 455 - protein, 133 aa, Homo sapiens
WCILEALRMRRKSRRKMMRQKTSKQPPTMLHLHASRPPGKEKPTNMFTTGMFSMVPAGQHGRRNLFKNTKAKRPLPQRRSTAITGLTAAGSRLQLTTPQRPPPRVPRPRGLLPPITTPLCIGRLRTYGNRFLR

SEQ ID NO: 456 - protein, 173 aa, Homo sapiens
WSHCYPLQLLRYQTSLKGSLRQKIFLPFSAFEVLLRCPTAWCILEALRMRRKSRRKMMRQKTSKQPPTMLHLHASRPPGKEKPTNMFTTGMFSMVPAGQHGRRNLFKNTKAKRPLPQRRSTAITGLTAAGSRLQLTTPQRPPPRVPRPRGLLPPITTPLCIGRLRTYGNRFLR

SEQ ID NO: 457 - protein, 58 aa, Homo sapiens
CITTMGKRYMHHPQIQMISTVNLLVIHLLSHQPVCSLALSLCKMGPTILLTFGVHQMG

SEQ ID NO: 458 - protein, 109 aa, Homo sapiens
DKIWGLGAQHSYLLQENLGQHTIHSLLQVPGGDHSMTLQRLIPCKQKKSERCLLVCLLLYMHHPQIQMISTVNLLVIHLLSHQPVCSLALSLCKMGPTILLTFGVHQMG

SEQ ID NO: 459 - protein, 24 aa, Homo sapiens
CSLALSLCKMGPTILLTFGVHQMG

SEQ ID NO: 460 - protein, 28 aa, Homo sapiens
KKLVIPKLIILMEKTLTGCLRALKMNRF

SEQ ID NO: 461 - protein, 46 aa, Homo sapiens
KKNQNWKKTSKMINQPRKSMCQKRGTLKRNETRLKRKARNLLGRKK

SEQ ID NO: 462 - protein, 45 aa, Homo sapiens
KDFSSIFSLDSAKNLYMGDVKEIRIDLKVWKSAKKCVQEIMQTGL

SEQ ID NO: 463 - protein, 22 aa, Homo sapiens
MESLTFFCVTHPQTKMSISIMS

SEQ ID NO: 464 - protein, 59 aa, Homo sapiens
NDVNIESWNPLHGSQIHLYLILLNNQRTEKDQLITLNLLVLLIFLSRIITLQQICIFLL

SEQ ID NO: 465 - protein, 27 aa, Homo sapiens
APGRSLQPGSIFLSLPETALKQYACTV

SEQ ID NO: 466 - protein, 54 aa, Homo sapiens
AQKGQLVKLPSRCPFTPPRDRHQIHHLSATRQQKVNVQKKEWQQPNNVLGRSLS

SEQ ID NO: 467 - protein, 38 aa, Homo sapiens
KDQILPFFGKKEILWPLPIAPGWFSFFMPFKMIGICTW

SEQ ID NO: 468 - protein, 70 aa, Homo sapiens
QKLHYKFSKTQEAKLKRIFHTSDQPCFLFYITNLKKDPPVKPNMPFIVSMRYFLVKRPSLHRYLSLCIRA

SEQ ID NO: 469 - protein, 245 aa, Homo sapiens
NLSPGRTTWRPRRLPSPPRGSEKPRRGASQGSGQGRPQKCLRKRPKTKGRKARKTKAPRCPRSPWRGPPGRPRRGRRSHPRPPRSPRRSHLRPPRSPRRSHPRPPRSPKRSHPRPPRSPRQGRGPPFWLPQKPWSGHCPHPPALAPRSYPRREGRPSQITGRIQERRPMWRHGSTSLSRRRRPSNPHWTTMTRSRGRTMRTLSTFGARSNPGHPQAEGGGPSGSGQSPLRRRPRPQPRRRGLSLL

SEQ ID NO: 470 - protein, 23 aa, Homo sapiens
QFLHGRHEPEAHPHHHHTGRLQW

SEQ ID NO: 471 - protein, 27 aa, Homo sapiens
NSPKKHLHRMLYMNRLQPSTQWYKITA

SEQ ID NO: 472 - protein, 40 aa, Homo sapiens
NYSNVQWRNLQSSVCGLPAKGEDIFLQFRTHTTGRQVHVL

SEQ ID NO: 473 - protein, 23 aa, Homo sapiens
EGKDFYPSAAIKKIAMTMDQYPF

SEQ ID NO: 474 - protein, 27 aa, Homo sapiens
WRKKINNQIIVNTVNQKKAKIKKKTGS

SEQ ID NO: 475 - protein, 12 aa, Homo sapiens
KKILAMTLTLNG

SEQ ID NO: 476 - protein, 49 aa, Homo sapiens
AGQPGGKGKTSLKVGARDLCRPPLLLSCPATRGSRLPILMVHTSSHQRG

SEQ ID NO: 477 - protein, 52 aa, Homo sapiens
KKKSLLLAIVQAIMSKKFLLKELKILRHQKLSDALPMVPQDQKATIFQIYHF

SEQ ID NO: 478 - protein, 30 aa, Homo sapiens
SSKKKQNTRSTNLEKNPSLKKQSQRRGKLS

SEQ ID NO: 479 - protein, 208 aa, Homo sapiens
PPAASISSPWSCTTTSSTWTQTWSAPQCSSRSWTSSTQASCCPATSQPSPTSAPSSLPPATSSCPSWQPSAAANSSEPASPLALGGRGPLAWGGPPAASGCPRPLSSKLGIRGSWMGARGPTPPRSSPKPKAQTMNSFLVALTRIACKVWAGLSAQLAGRRVWGAAAAAPTGAAGAASRSWAWTCPRKAHPCPLPPQVPTSLPMTQPS

SEQ ID NO: 480 - protein, 65 aa, Homo sapiens
CATCRRSRLHPQSRRLALHSLQSGRGPSRVACSWATAQQGGRHPPGSTRYPSFPLRLVPLSLIGP

SEQ ID NO: 481 - protein, 26 aa, Homo sapiens
PSAPRRTAEAAQDPPMRRPPPSAPMT

SEQ ID NO: 482 - protein, 240 aa, Homo sapiens
IPTLSHIRDSPWETDPISVMNVARALIELQTLFNIRESTLGKSPMNVMSVGRPSARAHTLFSIRESTLGKNLMNVVIVGKPSAVALPSFCIGGSTRGRNPMNVMSVGRPSAGAPPSPTIRESTLVRNPTPAMNVGRPSAGAQPLFTIRESTLEKNPMNVMNVGKPSARAHTSISTRESTLERSPTNVWNVEESLPTVQALFSIKESTPGRTPMNVVSVGKPSGTARLLFAIREFTLERSL

SEQ ID NO: 483 - protein, 236 aa, Homo sapiens
CIKEFTQGRNPMNVTNVGKLSPKEHTSVHIREFILGKNPMSVMNVGKRLLIIQPSGHITEFTQGRNPMNVMTVGRLSPRHHISEHILELAQGRNPMNAVNVGKPSLRSHMLVHIREFIRGRNPTNVMYVGSHLPIIQPSEYIKEFTQGRNPMNVMIVGKRSPRNHTLVHTREFTQGRNPMSVMNAEKLLPKIQLSEYTREFTQGRNPMNVMNVGKLLSVRQLLGYITPECIPERKP

SEQ ID NO: 484 - protein, 183 aa, Homo sapiens
IQPSMGTSHFQKGRNPMNVMYVESYSMSCHTILNIIEVIQKRNLMDVANVGKPFPIIHPSSDIKEYTQARNPMNVTNVENSSLRNHISLYIIEFIQERNPMNVVNVEKSSLGCQTSLSTTEAIQERNPMNVMNVGKSFLRSHTSLYTIELIQERNPMNVTSVGKNSTTDQPSIAIREFIEEEI

SEQ ID NO: 485 - protein, 79 aa, Homo sapiens
ELTLGKNPMNVMNVGKHSTASQISQNISEFTQEKNPINVMNVGKHSLIIHALLYTTECIQERNLINVLNVERPSCVLLL

SEQ ID NO: 486 - protein, 15 aa, Homo sapiens
KRNPMNVMNVGKPSL

SEQ ID NO: 487 - protein, 52 aa, Homo sapiens
IWIQCLTTCWGWTAMDAGGRPLGWAFRRPEGGRLSLPCRGGPQCPMCQGPLR

SEQ ID NO: 488 - protein, 109 aa, Homo sapiens
KPSTTQLCWSLTSMTTPPPSPKPPTPCSSARTTAPPCTSAVSALQTETQAPTPRSTTRYSRPRTCTCPSPPWSPSTQTTATCSPSGRWTTRPCRLSTSAWAPQTAAPRL

SEQ ID NO: 489 - protein, 103 aa, Homo sapiens
LCRSPTSMTTPPPSPKPPTPCSSARTTAPPCTSAASAPQTETQASTPRSPTRCCRPRTRTCPSLPWSPSTRTTATCLPSGRWTTRPCSLSSSAWAPQTAAPRR

SEQ ID NO: 490 - protein, 103 aa, Homo sapiens
PCRSPTSMTTPPPSPKPPTPCSSARTTAPPCTSAVSAPQTETRAPTPRSPTRCCRPRTRTCPSPPWSPSTQTTATCSPSGRWTTRPCRRSSSAWAPQTAVLRL

SEQ ID NO: 491 - protein, 103 aa, Homo sapiens
PCRSPTSMTTPPPSPKPPTPCSSGRTTAPPCTSAVSAPQTETQAPTPRSPTRCCRPRTHTCPSPPWSPSTRTMATCLPSGRWTTRPCRLSTSAWAPQTAAPRL

SEQ ID NO: 492 - protein, 103 aa, Homo sapiens
QCRYQMSMITPPLSPKPPTPCSSARTTAPPCTSAASAPQTETRAPTPRSPTRCCRPKTRTCPSPPWSPSTRTTATCSPSGRWTTRPCRLSSSAWAPQTAAPPR

SEQ ID NO: 493 - protein, 103 aa, Homo sapiens
RSWSPTSMTTPPPSPKPPTPCSSARTTAPPCTSAASAPQTETRAPTPRSPTRCCRPKTRTCPSPPWSPSTRTTATCSPSGRWTTRPCRLSSSAWAPQTAAPPR

SEQ ID NO: 494 - protein, 60 aa, Homo sapiens
ECVHRWSVWAASWMGCATTTASPSSLTASTTARASTARWAAHHCASECAPRVSGAPTRGA

SEQ ID NO: 495 - protein, 31 aa, Homo sapiens
SSLRITGDWTSSGRSTKIWKTTQMCRKTWSG

SEQ ID NO: 496 - protein, 227 aa, Homo sapiens [sequence omitted]

SEQ ID NO: 497 - protein, 192 aa, Homo sapiens
FNTKEFTLEKDLMNAVNVENPLPANLTSFNTGEFILAQDLMSAVNVANLLDSALASFSTGDFILEKGLMNVVNVESLLAKVLASFNTREFTLEKGLMNVVNVGNPLARALASFNTREVTLEKDLMSAVNVGNPLPTNQTLFSTKEFTLEKGLMNAVNVGNPLAANLTSFDIGEFTLKKGLKCEGNVLFLYSV

SEQ ID NO: 498 - protein, 190 aa, Homo sapiens
FTLEKGLMNAVIVRKPLSINLNSFTTRDVTLEECVMSVVNVGKPLATNLTSLNTREFTLEKGLMNVASAGNPLDKALAFFDTREFTLEKGLISAVSVGNPLDKSSISFDIEEFTLEKCLISAVIVGNLLAANRNSFNTREFTVEKDLMNAENVGNPLDNSLTSFDTAAFTLVIGLMSAVNVRNPLAANLS

SEQ ID NO: 499 - protein, 303 aa, Homo sapiens
WRAAAVAGCPHPLASHRWLPAWALSCHPHPLRPLQPPPPPRATRLSYVGPSQRVGAAATGPSASLPMAWASCARPIATPNTRRNSVTSSTSRAAAPTALAATSSTTLAKTWRPRATLLCFARASASPACPLAAGPHHHHQAWPALPCPPAPSRPPAPHHHLGTFHCHPLPSLLPLAPPWLEETPPQSVAPPAEGPLLSASGGPWVAWFGPPLYSPWDPTLMNMPAAAAAWGALTLPSSRREFLHHPSPWQPPGDSPSSIASLFLSDKVTARSDQLDLSGEPRLLHCGLCMDPRAVGTWGTVIK

SEQ ID NO: 500 - protein, 148 aa, Homo sapiens
QALSNFSIFSRNAAPATSSSSLASGSSTAFFYGSCKDPQHGFYSSASSTTHSSPTTTTSSSSSSSPPTSSTFCSSTGPTAGFSGPAALSFHYDATCATPCASSPACPAAATDGRTLCRPHPTLPAAARIRSQLLKTFSVQTPTDKNYR

SEQ ID NO: 501 - protein, 200 aa, Homo sapiens
ALRTTETITITAMGTPTQRGEKPQCHPPTAAPSCSPLLTRLPLPHLGHHLSGPSSSGPREADLQLRYLLPALLLHLRLLLPPPWSSPGVAPVRPPTPTWGYWCTAGCTLAPAARACLHPCTWPRGRESTTWLAGCAATRVEEAWPTPLMPTGWGHSCLACSRRTRRAPPLRPAPPPALHPLPPGFGVKAAATAPCASRAK

SEQ ID NO: 502 - protein, 240 aa, Homo sapiens
AVPICQAHPLQHPTWRVPNSQLSLWLLGSRLSQTTWHVPLHLQTEFLACLRKLWIRNPRIRRGNPLSRRPLHPFPKRSPGLKIVSPFVTQLKVFTPKSHSPLKRSPKSRPSGFNFHVSNHPGWLKVSPLTRYAPGSSPPRSPPAGVGLAPGPSQTLKPVLCRSEGREVTTAIERRPPLPSEGGVARVEVAAGPPMREVAEAAAVVMVVRPVATLSPGEARAPLESVRQIYSEHNYCRLIL

SEQ ID NO: 503 - protein, 253 aa, Homo sapiens
SRAPGPCWSFPATPRSTGRTAGRRPGRPPRSPPVRPDRAPRPTDSGHRPTSERGKATNTETRLSKGGRESGLTWGPKRSRWRSPTPRAGRPRTGGESASAAETGAESGTGTGPGSGTDTGTRTPAGTGTETGRGAPTATESARPTGARSGTAAGSGAGTESASETGGATGTGPGAESGTETRPGTGSGAATARTGARAKRALGTRSPRPRGPPTLAPPRRPRRPGRAETLFKATFVRCVEQIAFEIATILDSG

SEQ ID NO: 504 - protein, 392 aa, Homo sapiens
DLISALWTPSQPRAPTRQSLNSLSSSAPSSSTIGPSPSPPAPGPAPPLPWLPPSPSSLPRLSQVSRRPHSRLHPPPSPQCSHCFPPSFKPNTRCEPPRPGATGEPVLSLTGWHLALNKTKSTGDRGRGKWLSPLPSQDLSGSTSQWYHRLGCQVPWAWRCRPELAWTHLRTELGRQWLQCPPSVPWTTTPRSCSHQPPGASLCLYRAHGRDSALAFAGEEDALRFRVGLATPEENTSCWSVSSHLPSAHTPKVRVQPGWRPPWERVGHGSATTRYLLRALALQIRTTEDSFVPGPRECGTPRFIPTVPLHSLPETFPGKQRNTRRKNGKTLPVIKKEETTERKLQTSRFHSVPASAGREGGTQVELTLVFVAAKPGCLELWPEGLLGSHSPT

SEQ ID NO: 505 - protein, 241 aa, Homo sapiens
WGKGLAPPWLAPPEAGAARGAEAAAVVTAAFTKEASKKAMGPLDEAPGKSSAARAGMTEARGGLRSQQGGMEHDVALRREGLAQGRSTPAQTARTGAPYGRNRRRRRRAAGGSEQGPGETATAGAPPALMVVPALLAGGNMGNGGASLNLICEGIEEGVVKRRGGEGEAALTCGGAERLKALRRTRMGSQSGAWTMRMKKWAPLMPLGPSCLSRRAPRSPFLRSRSWTSKGWRRRRNLPKG

SEQ ID NO: 506 - protein, 97 aa, Homo sapiens
TLCIRWSTASRMSPSRPRPSPSPPRVPTGCPPPPTLRPCPAAHPRHPHRSATRRQGRAQGAPPTMTRTLMACRATAAMGPHTYREAPSSWGAAMWSP

SEQ ID NO: 507 - protein, 184 aa, Homo sapiens
WERRRARPSCHPELPGQRSGTRRVGTQAQTHPPSCVLRVIFLCLPLPQTLIPSSRLPPPPPRPPMPCFLPVGPTGTPGTQRLSCGMSCWTRPPPHPRAPTLRPMGTAGPLHPPVPSACWLRLKGWTSPQAGACPRRGPWWMNESCTQQGPQSPRPLSPASLQTAAPPGARRATSSTWTSWPMTQ

SEQ ID NO: 508 - protein, 92 aa, Homo sapiens
CTAVPTPWPAGPGAAAARATASRGPSPSVHPRAPPRTARGVTARSPSGDGRGRLCRCQEGSSWTLLAGRQASAAYVETVHTAASEAPGFPHT

SEQ ID NO: 509 - protein, 145 aa, Homo sapiens
TTLTPAKKPKKSWPGRAASPSPRSLTGLATKESGIKRTWGSFKKRLPFTRVKRLWIPRKLGSQGTTPAACQHLAPAPLDPSRCPALGTPSSPCGLWPLSSLLLGEAACSPRPRVAGRGPPPNLQLPHLLETLAASTPVHLIKFGG

SEQ ID NO: 510 - protein, 127 aa, Homo sapiens
PWSWGGRAPTSSCQMPIWIGPWNRPTSPCSSTRASAAVPAPGPSCRRTSMMSLWSGALPGPSLGWSGTPLIARPSRGRRWMKLSLRRSSATSTRGSKRGRSCCVVGALLLTVVTSSSPLCLEMCRMA

SEQ ID NO: 511 - protein, 140 aa, Homo sapiens
AVLLMGNCQCCSPTPSTSWLRSSKSPRRTSQFLCPSRLAAGLGVRLWQCPHTRSPHPPPAMRVQTRPLRSAVLSTRHCARLSAQPTRRGPPALSPPTSPRCFLERMTACCVLTAYATTVLSVIWVLSSAQACCTWLRMGC

SEQ ID NO: 512 - protein, 271 aa, Homo sapiens
SLWVVPLFSKRIISKSLISWIRRMMMVGQGPMKRLTTLKSSSSAMRKMGETLMRRVLRATGIPNQLLVRNGPLKQMAKRATPPTANRPLLRRPGQKPLGLQRQSRDLLPQSLPYPHLTGAPPGTGAPLGTTQIVGVLPASPQHLKMRMRHGGSDESSRHLRFPWQWSGPGDGEKKRSGACKKSAGQPVLRSSSDSMKSLGHLTSGSKQSLLPHLLPLLPQLHHLQSLKNSLHLQLHLQHQPQHQRQNLKSQHRPLLPNLLLLQVWLRLPLW

SEQ ID NO: 513 - protein, 110 aa, Homo sapiens
PPRVPAPAPSTVTRSTSPSLPQPMPPYSASAPRPLPTSIWSAPRPPWTPTSSSSLARVSALMLPVVEEVVMEPPGGAPAQPACPRGGSPHIPSHQQSSASGSPWPMTRRK

SEQ ID NO: 514 - protein, 46 aa, Homo sapiens
TQSHALRRWGGGSCGRACSCGRGCGTPRGDWKRHTRRRSRSRPPRR

SEQ ID NO: 515 - protein, 108 aa, Homo sapiens
CGLFWALPLSPIFIRSSGTSSLWPTGRSCCACWCSSRWAWCSPTAVATETGVSSGASRAAPSSPSSRIFSQACLSLASSGPNPPLNQKIRSSSRPGGAEKEPIFQKQA

SEQ ID NO: 516 - protein, 48 aa, Homo sapiens
GRRGMWAPTRKRWTSSWVPSSCRPPHAEKRSLGRWSLSDPTVHRGADP

SEQ ID NO: 517 - protein, 160 aa, Homo sapiens
GGGGPAAAGHVHGGRADVGGYGHVHPPHRLHRGHLPAAPQAGQAHRQVPDGGPAGGRLLRQGEGGAGLGDAVQEGRQDPQEEEVAKDPQRGGQREEGNSTTEEVTAQKCHPAGGCVIQRREAENVYGDGVLRVWHAGNAGQRAGEAFPSVPGPRVLLSAD

SEQ ID NO: 518 - protein, 78 aa, Homo sapiens
PPLAPWSCYSPASPRPSWGPSWKPSTCAPPAETSSAGPSRRSVATGTAPSAWPASSALGLRTVLPVFTRAYMKKAFLF

SEQ ID NO: 519 - protein, 160 aa, Homo sapiens
RPRRHRPLHWQPQRHRPLHQQPRKHRPLNPQAWRHRPLHQQPWRHRPLHQQPWKHRPLHQQPWRHRPLKPQPWRHRPLHQKPRRHRPLNPQPRRHRPLHWQPWRPCPQNPVPQRPCPWNLLPKEVCSYPFLCPLLLTRAFPWQPAICPSTTQWGPQTTSL

SEQ ID NO: 520 - protein, 190 aa, Homo sapiens [sequence omitted]

SEQ ID NO: 521 - protein, 138 aa, Homo sapiens
GARRGLSSHLGGSRQLGTAHPAPSPHLPKKAETHSVPRQERGRRDTPLNSPGEGFPHLGFMKKQTAGEPTPGTPPHKDSEPLRPPPKGYQQEDHLPCLVPLAQPSAWASGCHSGMRPRVRSSSSGSQSLSVLQPLSKA

SEQ ID NO: 522 - protein, 111 aa, Homo sapiens
PSSLHPLSHSHHHPHPPARPACSNPWPPCWRDKSTVIGGLEQLFPPGLGPCPPLSIPLAPHQVLPPCRPPQRPLAPRAPHSPLLPRHLSSLPQAGPGPGSAGRAKSQSRAP

SEQ ID NO: 523 - protein, 96 aa, Homo sapiens
GRHGAPNPPPATLGGPGPDPDLGGLPLHEVFLHIRVPARPRGAPLHRRGLRGRHAVRAVRQRRREPEDGAAGAVDRAGGAGVLGPGDTECEGPVTD

SEQ ID NO: 524 - protein, 96 aa, Homo sapiens
GRHGAPNPPPATLGGPGPDPDLGGLPLHEVFLHIRVPARPRGAPLHRRGLRGRHAVRAVRQRRREPEDGAAGAVDRAGGAGVLGPGDTEYEGPLTD

SEQ ID NO: 525 - protein, 196 aa, Homo sapiens
RGNPLFVSIVGSPSARRPPSLDITKHIRGRKPMNVLSVEVPLGRSHTSLITRELTQERNRISVMSVGRHLSRRQPSLFIRELTQERNPIFAMNVGSPSAKRQPSLSTREFTRGKNPIFVMNVGSPSARRQSSLFITEYIQEKNPMGVLSVGKPSVGNQTSFAIRKLTQARNHMNVNSVGSSSVVSQTSLSIRKLTR

SEQ ID NO: 526 - protein, 122 aa, Homo sapiens
RAFAFGGFLASSTTLRPSSTSFSTSQQPPCLFPAPVGSGPHSWGWGGICRGSRGSKWGAIFRLGRPVPPTFPPTFSPPYPHSFKFCAAGCHPGSPLGDTPPALCPECPPTWTTYLQCHHGNY

SEQ ID NO: 527 - protein, 206 aa, Homo sapiens
SSWLRCCASGAAPATAGRIRFSREQPGPSASWPPGGTRPAAGRPGVSGQTQGAAAAQPLCVPSVWRSSLRGRSYGSFPASMSSIVTVWTPGYISIGLAPSACSTSQREIHFPSPWDPLDLTKNQVEDSTSFASIPAMPTTTSLLPTCWALPGVQWLGPHDLVPSCHPRSQAWALGITASPELHIPGLQESSSAWQEPSTPMHKAGD

SEQ ID NO: 528 - protein, 53 aa, Homo sapiens
RQHLKMVKYFHQKKDRKRKALKKNVKNPKVILIFLMKKQPSKVRRKEAHGLPL

SEQ ID NO: 529 - protein, 92 aa, Homo sapiens
AATKWSGGGTAWRCSGKTPWLHSPTSRGSWTYLHTPRAFACLSWTDSYTGQFALQLKPRTPFPPWAPMPSFPRRDWSWKPSANSASRTTMWT

SEQ ID NO: 530 - protein, 46 aa, Homo sapiens
QGPLHLTTSPHQACRITFLRYPALLPCPGQWRTAPLLASLHSCTLG

SEQ ID NO: 531 - protein, 93 aa, Homo sapiens
ALGPHSRISCLPTQTRGCILLAATPRSSSSSSSNDMIPMAISSPPKAPLLAAPSPASRLQCINSNSRYPALLPCPGQWRTAPLLASLHSCTLG

SEQ ID NO: 532 - protein, 133 aa, Homo sapiens
SRSSWGGIRTPGHGSPPARWESPWPVHTRPRSSPGMNSEHSGSAGVVALSRLAMVQSHPMSLSLWPGPSRGHQRSSSLAFPPAGAPWVNSESGGRWRWTRATARPSPWGSHTAPSLGLSEPPPPSSGTSWGQP

SEQ ID NO: 533 - protein, 64 aa, Homo sapiens
RRTVPRLTPGPMWPACQGSRTATRAPSTKTSCTSRGATTTKLAPTARTCYATTTGQTCGRSGGP

SEQ ID NO: 534 - protein, 197 aa, Homo sapiens
RSSPSARPTPARCWRTSTSRSSPRTTCCTASSRPCARCCPRRPTARASSRRPCATTTTWRPSPSCRPSARRCAPTRSACCLWAARSPSGVWSSVTTPATWTPRASSGSKRRRCPPGGATTVSRCWGASSSSPAAASHGTTEGMRPPIFFIGSRTATRAPSTKTSCTSRGATTTKLAPTARTCYATTTGQTCGRSGGP

SEQ ID NO: 535 - protein, 111 aa, Homo sapiens
GGEIPKAQTARGGGKMILLLQEWSRAISGGIAKRRRLHGMTRKRINRDGVMDKNQAKGGLFLPVITGEKLQGITIGVRPIRNPAQEVVTVTGPFPVGTNLVKLVLSLGETT

SEQ ID NO: 536 - protein, 52 aa, Homo sapiens
RPRPRSRAGKREGTRQGKRTGTRKRREREGERARTGERARARTGTRKSERKG

SEQ ID NO: 537 - protein, 46 aa, Homo sapiens
RRKASRPETEKCLANPKSAKKCMTHWRTSPRTARLTRPPSPDTCPP

SEQ ID NO: 538 - protein, 433 aa, Homo sapiens
RNSPSGVPSSPSNAFPRGDPCWTHARTSRPLRAEPRPPRDCVQGKTPPRQVSQKSSPRCAGSAGRAPGRASSCAASAGRRSARAPPSRCTGAGTAGRRLTSAMNAARPSPGAPTFWSTGASTPARSPSSAASAGRPSAATRPSTCTSASTRASGPTSAAPARRPSAAARCSACTCGCTPARSPTGAASAARPSTSVHTSHATTASTRARSPTSAAPAARPSPATHPSPCMRRSTAGTSRSSAATARRPSTAARASPSTRGRTRARSPSSAPTAGRASAATRTCSCTGASTAARSPSSATSAAKPSAPTPTSSCTGASTQARSPSTAASVGRPSAATRPSSCTSASTPVRSPTSAASAAEPSARTTVSLNIRKSTPGRSRLSVRNVGRCSTGARTSLSTRGCTARGSPWPSSSTNTCSAHTTCLAACWVQGMLD

SEQ ID NO: 539 - protein, 226 aa, Homo sapiens
RPSIPATSPSSSNPAACASTPTGPARRPPTNALTLAQWSPVIAASPAPTSSPATSASTQARSPSSAASACATSAAATTSPPTSAPTQAKSPSPATSVEESLPGAMNARGIPRSTCGRRTRKQTKVLWPLRPPPLSLPTRPRLLPLTRPRLLPLIHPRPPPHTHPLCPPPSPLPAPRPTHPLCTVASPPRRWPPRTPLFPLLSRPRSAASLPQLSPTPSAPPQGFRT

SEQ ID NO: 540 - protein, 126 aa, Homo sapiens
PSSPHLQTPASGRTWRCWPIVPCPPSSEVIFGSCPSLVLTASTAALTSASEWLAAASSATRPFSVAAVTTSEPCWMTTSERARSQRPQGAPQPSPCMASHPTSSLTCSTTCTATTLSCPPRQPMMC

SEQ ID NO: 541 - protein, 88 aa, Homo sapiens
CCSRAGVVWSVLCVRCVARPPTPHACCSVMTVILATTHTAWTPHCSPSPRAAGSASGVCPVCSVGLLPLASTVNGRIVTHTVGPVPAW

SEQ ID NO: 542 - protein, 50 aa, Homo sapiens
NLNKAHTQKVRTCLKKTESQMASPESQLKKYRRASYPSTKFLLEKNSRRP

SEQ ID NO: 543 - protein, 89 aa, Homo sapiens
SLLSLWTTRPDCLKDVISMSTARATSSWRSSCSWPTWQWPTRSTAPSPSRPCCAGTPRPKQGCSVTWWNSATRWGCPWTSAPQEPSIKA

SEQ ID NO: 544 - protein, 68 aa, Homo sapiens
KWHWKKLPSCPLATWWTSGAGGSLVGVPPLPATTSTGGIFEPSIRGSVLLLPETKPTLMLELSFMFQM

SEQ ID NO: 545 - protein, 93 aa, Homo sapiens
NEKKKKEKLKRVKIPLVLQASQAYIAHTARTVALKTACTMLEITSMWNLQRPTYNHISSVLKDCGRIQLVKNGCMAVGFTDQMKHSTWLHENF

SEQ ID NO: 546 - protein, 92 aa, Homo sapiens
NEKKKKELKRVKIPLVLQASQAYIAHTARTVALKTACTMLEITSMWNLQRPTYNHISSVLKDCGRIQLVKNGCMAVGFTDQMKHSTWLHENF

SEQ ID NO: 547 - protein, 35 aa, Homo sapiens
LCSRYSLFLAWRLSSVLQRFRFTHVIQQRMESQIS

SEQ ID NO: 548 - protein, 45 aa, Homo sapiens
KRQKLHCRPSGLRTSPLFARWAAPLTSSCGSWIAYCCCFKGKSVL

SEQ ID NO: 549 - protein, 57 aa, Homo sapiens
ETSGPLSPLCVCEGDWWIDSGQQEQKMAGTCNQPQCGHIKQCCQLLEKAVYPVSLCL

SEQ ID NO: 550 - protein, 126 aa, Homo sapiens
EAQPPHPQLPALQPSPPPPWAPPGPAYHRPPHPRPPCPQPHPPPLQRLSTPPQCLPPRPPQPGPPALWPPPPPPQEQLTLPKCRLPQPRASQPPPPPAQGRHSRLQCGSAQPPHPQPPHPQPVAPR

SEQ ID NO: 551 - protein, 121 aa, Homo sapiens
EAQPPHPQLPALHPSPLPPWAPPGPAYHRPPHPRPPCPQPHPPPLQRLPTPPQCLPPRPPQLGPPALWPPPPPPQEQLTLPKCQLPQPRASQPPPPPAQGRHSRLQCGSAQPPHPQPEAPR

SEQ ID NO: 552 - protein, 121 aa, Homo sapiens
EAQPPHPQLPALQPSPLPPWAPPGPAYHRPPHPRPPCPQPHPPLLQRLSTPPQCLPPRPPQPGPPALWPPPPPPQEQLTLPKCRLPQPRASQPPPPPAQGRHSRLQCGSAQPPHPQPEAPR

SEQ ID NO: 553 - protein, 121 aa, Homo sapiens
EAQPPHPQLPALQPSPPPPWAPPGPAYHRPPHPRPPCPQPHPPPLQRLPTPPQCLPPRPPQPGPPALWPPPLPPQEQLTLPKCRLPQPRASQSPPPPAQGRHARLQCGSAQPPHPQPVAPR

SEQ ID NO: 554 - protein, 37 aa, Homo sapiens
LPQPRASQPPPPPAQGRHARFQCGSAQPPHPQPEVPR

SEQ ID NO: 555 - protein, 62 aa, Homo sapiens
DGKKTSHWGNHQDSYILGGVYFGISTVQLQRDVKHVNTQVKQKPSMITLLCHLGTLEVQGPH

SEQ ID NO: 556 - protein, 91 aa, Homo sapiens
CLCFMWLLQKKYMILIESPKVRTEKTTKSWKAKYLLSWLSSLCVLLHFILPEFHILTVKPTIRLTVDCKINCLLLKKQLSFWQQLTFVWIP

SEQ ID NO: 557 - protein, 78 aa, Homo sapiens
LKSLRPWTLRRQSTWRPMQWGPHHPATHARAAARRGRSLGSGTSPMKPPQLLSQTPRLPPCLHTEEPSHWTGGPRSPP

SEQ ID NO: 558 - protein, 78 aa, Homo sapiens
SRLLICTIMLPRPVAPPKRCLTPPGQDHRSATQTCRIQKKISSHLTACFEKTHHCLLCPKTILSSLWNWREMMGCLSL

SEQ ID NO: 559 - protein, 68 aa, Homo sapiens
QQYAVLPTGPLFTGSFCSIPAVLTRKSLCMKKKKFCNFILLFSLILSIKHISVFFHIFSAVILTQYRS

SEQ ID NO: 560 - protein, 41 aa, Homo sapiens
QPWQLPRTHTTKKWKRFVVVTNHFWPQMTCRPNTCNLRKNL

SEQ ID NO: 561 - protein, 37 aa, Homo sapiens
KKHDSREDCRVPTYHPHICSYWRRNRRIKELYKKVTG

SEQ ID NO: 562 - protein, 81 aa, Homo sapiens
ELQETGHRQVALRRSGRPPKCAERPGAADTGAHCTSTDGRLKISVETYTVSSQLLMVLMSLDLDTGLVPSLVSKCLILRVK

SEQ ID NO: 563 - protein, 41 aa, Homo sapiens
RMERELKKWSIQTCLSARTGLSISCTTLNSPPLKKMSMPAV

SEQ ID NO: 564 - protein, 83 aa, Homo sapiens
PLLQLLLEMSHLICHTLTVKSLVQLQVEKELLWEPQQPLLLQPHSVIRMTTCTFHSPRPQSHPPGRKREWILQDHVYTDNTIF

SEQ ID NO: 565 - protein, 82 aa, Homo sapiens
PLLQLLLEMSHLICHTLTVKSLVQLVEKELLWEPQQPLLLQPHSVIRMTTCTFHSPRPQSHPPGRKREWILQDHVYTDNTIF

SEQ ID NO: 566 - protein, 29 aa, Homo sapiens
QKNDVQKNWSSKKENMKIQITKLNWETLI

SEQ ID NO: 567 - protein, 108 aa, Homo sapiens
SATARTSATSSRSASRPSLGPRTCASSVRGAASLCRAIPGARSPCPASTACSSWCTTTCRPLEPPPSPRHLLNPPPRCPSSRLPSHSLGVPPEEPITSTPGARRSPWC

SEQ ID NO: 568 - protein, 73 aa, Homo sapiens
PTDPFLGLRLGLHLQKVFHQSHAEYSGAPPPPPAPSGLRFWNPSRIAHISQLLSWPQKTEERLGYSSHQLPRK

SEQ ID NO: 569 - protein, 102 aa, Homo sapiens
KMKKKIRKKMKKIKTKRKGKLEKKTKMKKGKKMEKRIKMEMRKEKMQKRKKMEKKVKTEKEMEKMEKRKEKMKKRKKTEKKQEMEKRMKMEKRREIKKRGKM

SEQ ID NO: 570 - protein, 65 aa, Homo sapiens
TTGRTVASTPMRLSPLSSPTQGAWWQWLLPGTPPEQRREKGLSSPKHGFGIVSTSVTHLVRGHSV

SEQ ID NO: 571 - protein, 38 aa, Homo sapiens
NILEGKKSRLPHQSPGHLGLFLLHQVLRKLKQMLNNKL

SEQ ID NO: 572 - protein, 108 aa, Homo sapiens
HPLPCPRAIISPPTLVLPLSHQCLQPLCTCPWSWGPWEGPPRWRGLGHPPSLLAAYSLQRPRHSIPHYPLPALYRAEGPVPRHPQLPTPHHFVPLSVVPADPLLYFDC

SEQ ID NO: 573 - protein, 64 aa, Homo sapiens
KTCGVQIPATQTMEWMDPPALFLFTSVRLKIGVLIYLGEQKIPTKKLIIIHWRKFVQILIFSTV

SEQ ID NO: 574 - protein, 57 aa, Homo sapiens
KYHSVFYFQFSVPHSGNCLFKRKTLQATLLQKLFFCFFCDFFIYFYIIHHVVSSCLC

SEQ ID NO: 575 - protein, 110 aa, Homo sapiens
ASATQPSTGSWCLSRTMASLLARPPPRCTCSWWTASPSPTCLSRRRPRPRPRPRPTCSPSTWWWRWPRCLRSSSSRCSCSWRCGCAGGAGRPRWVAARCPRVLFQGIWWT

SEQ ID NO: 576 - protein, 108 aa, Homo sapiens
ASATQPSTGSWCLSRTMASLRARPPPRCTCSWWMASPSPTCLSLRRPRPRPRPTLSPSTWWWRWPRCRRSSSSRCSCSWRCGCAGGAGRPRWVAARCPRAPFQGIWWT

SEQ ID NO: 577 - protein, 108 aa, Homo sapiens
ASATRPSTGWWCLSRTMASLLARPPPRCTCSWWTASPSPTCLSRRRPRPRPRPTCSPSTWWWRWPRCLRSSSSRCSCSWRCGCAGGAGRPRWVAARCPRVLFQGIWWT

SEQ ID NO: 578 - protein, 108 aa, Homo sapiens
ASATRPSTGWWCWSRTMASLLARPPPRCTCSWWTASPSPTCRSLRRPRPRPRPTPSPSTWWWHWPRCRRSSSSRCSCSWRCGCAGGAGRPRWVAARCPRVPFQGIWWT

SEQ ID NO: 579 - protein, 108 aa, Homo sapiens
ASATRPSTGWWCWSRTMASLRARPPPRCTCSWWTASPSPTCLSRRRPRPRPRPTCSPSTWWWRWPRCLRSSSFRCSCSWRCGCVGGAGRPRWVAAWCPRAPFQGILWT

SEQ ID NO: 580 - protein, 108 aa, Homo sapiens
GSATLPSRGWWCWSRTMASLRARPPPRCTCSWWTASPSPTCCSRRRHRPRPRPTCSPSTWWWRWPRCLRSSSSRCSCSWRCGCAGGAGRPRWVAARCPRAPFQGRWWT

SEQ ID NO: 581 - protein, 106 aa, Homo sapiens
ASATQPSRGWWCWSRTMASLRARPPPRCTCSWWTASPSPTCGSRRRPRTRPTRSPSTWWWRWPRCLRSSSSRCSCSWRCGCAGGAGRPRWVAARCLRAPFHDIWWT

SEQ ID NO: 582 - protein, 44 aa, Homo sapiens
YQSRVLPQTEQDAKKGQNVSLLGKYILHTRTRGNLRKSRKWKSM

SEQ ID NO: 583 - protein, 82 aa, Homo sapiens
KPPQTLDRVRRKPELARSSKNTRRKKRGPRTPQPSRSRTLGSVRPGRPGMLGTLAQWGRRMRNRQPWGRNGSGRAPENTMGR

SEQ ID NO: 584 - protein, 22 aa, Homo sapiens
RWSGPSSASYPSGRKFACGVFG

SEQ ID NO: 585 - protein, 195 aa, Homo sapiens
IGLDTQGTITATPHPREGLMPPMGSQDPEVQAGKQEMRNNQETAPGTQGHVTMNLPLGPAALDTHRWARENQRGPRQAGARDPVLVRTGTVRDTQKTLRGGLSRLPETIMDLLGSSQDMAPGTPGPIKKIEPVMGTLQRAPDNQALVMQRLPLVDRLHHPRNRQGQVQEKDMDPATSSQQTAPQTQALGADKIHL

SEQ ID NO: 586 - protein, 106 aa, Homo sapiens
CWMRGAHAQHLPSSTPALYLVPFCRTPTSSSRLSQRQIWALALTGPGAPSSLTSQKTLHPLRGPGFLPPVMAGGRRAWHCSKKSRPVQGGMARPGWPWPQTSVTSA

SEQ ID NO: 587 - protein, 29 aa, Homo sapiens
KNPCGGWEGAGSSRSLHQSHYFRRIREGF

SEQ ID NO: 588 - protein, 174 aa, Homo sapiens
ATLPRRGTAGCSGQCCRHRHHHLRPRFPQPGQSLPLSRSPPWRPSLSPGLRPPSTPRFFPGRNPPSTPSLPLILSLNPAASLGISMLPHRGIGDSLLIGFLGIRSPSTLQLKILIIHESMMQNSQTSAYLPVENRKKRKERNQFFTFFVIPVIVVLKIKKSMTNTCLNIQNALN

SEQ ID NO: 589 - protein, 64 aa, Homo sapiens
ASPTAVLFTHWRNSTLAWLLTWTKLKRRGRGKKEGEEDQRRKEEGEEKKGKKIKTHHAPGSTAC

SEQ ID NO: 590 - protein, 43 aa, Homo sapiens
LWLAVSLLPSAHGQSQDVSQFFLWSSRHTSLRITHKRHGSIPL

SEQ ID NO: 591 - protein, 24 aa, Homo sapiens
WSWRISSRIFGGKKIVALMSSTII

SEQ ID NO: 592 - protein, 139 aa, Homo sapiens
ECTQGRNPINVKNAGKRSVIPVLFEIMKELTLERNPMNVNNVEKLSDITKLFKYMKGLTLGKNPISVSNVVKLLVVPHPFEVMKGFTLEKNPINVKNVGKPSVFLVPLENMKEFIQERNPMIVRNVGKHSFLFQAIEDI

SEQ ID NO: 593 - protein, 126 aa, Homo sapiens
NVMTVRKYSAKSQPLLFTKEFIQERNPMNVLNVERPLARVPTLLNIREYTQEKNLLNVLNVGKPSARMLILFNTREFILERNLISVSSVIKHSASLHTLLNIRGSTLERNPMNVLNVGRLLVIAHP

SEQ ID NO: 594 - protein, 22 aa, Homo sapiens
RPQRQKGMPRRLKGRPSQSQKM

SEQ ID NO: 595 - protein, 22 aa, Homo sapiens
RPWRLKWRPRRQKGRPSQSQKM

SEQ ID NO: 596 - protein, 68 aa, Homo sapiens
VSRRGPGKCGFTSFQRPTQSFSWQLPIRSHSEIRISRSKEKKSFPSAFSEWQNHTTPKSPFTRWLLTI

SEQ ID NO: 597 - protein, 145 aa, Homo sapiens
PPATRARPHPPSVKPTRMPTRCPPTTSPLSKAAAPRRSTLRPRRPSMSRTSSKPTGAPTGRPPCRAVRCTWAGAATRIRCRPLPAPPSMASTTFPITLPGTWTTTGRPLWRPASTTDPANPTPPTQTSPLTTRLLLRVESKKRPN

SEQ ID NO: 598 - protein, 55 aa, Homo sapiens
LHIRSSILEKNLTNVRNVASASLKIHTLQVIEEFILGRSLTSVMSVAKPLVFAQA

SEQ ID NO: 599 - protein, 55 aa, Homo sapiens
QSIRSSILEKNLTNVMNVERSSVNLQTLQVIREFILERNLTSVMSVAKPLEHIQN

SEQ ID NO: 600 - protein, 83 aa, Homo sapiens
LPIRQFILEKSLTNVMTAVRSSHKIHTLQVIGEFILERNLTSVMNVVKPSVKHHNLQGIGEFILEKNLTSVMSVAKPLVFIQA

SEQ ID NO: 601 - protein, 22 aa, Homo sapiens
KELLKVVLQSQKNILRSHFKCP

SEQ ID NO: 602 - protein, 67 aa, Homo sapiens
ARETAASETAPSRKGASGCCPPRSSPGAARSTPAATRRSCAAPLRKTVPVSTGTSASSHTASTSSAA

SEQ ID NO: 603 - protein, 101 aa, Homo sapiens
RSTSGPTRVRGPSRVPPAASPLRPRAISTSTGGRRRTSTTPGCPQSPRAPGAASWRKGTRPESPPDQRAGARAGARGCTKAPRRDPFLRVPTCPYLPRTWM

SEQ ID NO: 604 - protein, 49 aa, Homo sapiens
IKCRRRSKQPSEQARGFKSTLAKCFGKNRTKEAAAGWCLAPGQRVPWRN

SEQ ID NO: 605 - protein, 81 aa, Homo sapiens
SSTTRPVRRTCGGVSSTTPSRPRTPSKTSVTWRGAARSPLRGTRAAAMRRPRRERRDRPRQRLSVTGLGRPCLRSRHASWS

SEQ ID NO: 606 - protein, 126 aa, Homo sapiens
ARSTSGSWTSSPITGRTSSAGRTPSATRCPSMTASSRWHAPRTSRARAPTGRCTRTPATCSRTAATCAARSASSARSSRGPAAGAGAEAGAAAPRAALRAARTPLAPLTPAPTRPSIGVCTGRPAS

SEQ ID NO: 607 - protein, 167 aa, Homo sapiens
PTGGHPGVWGPCAPCCPVHCPGGPWWWDHCGLRSRCWEWPQWASTPGHPATRCPGQGWGNHPGTVHPAHAAPAASGGTCPSTSPWDQGSGSQRPCTHHQHPFHPPTGHFHQRQSPGCHCTHSWHPHPAVCTLRPTPQSPVSFSRAGPAPGWLSPAAAWEGPSASGRP

SEQ ID NO: 608 - protein, 202 aa, Homo sapiens [sequence omitted]

SEQ ID NO: 609 - protein, 273 aa, Homo sapiens
LAIRSTRPSCAAPFIPSASAPMGRAATSSTTRTSGGPRRRGAPPGTCVPLARAMRCTWASRGSRGPSCTTASASRASRRATISPRAASSRRCCSTAPRRARRRRPPALRPRPAPPPPPPVPRPPRPPRPRAPRHAAPPRRPRLRPLCCTAPGAPRTCWRRGPRARPARRPRAPTTPSPSVRSSAASSRRSPSRPTTLPPWPPPPTTAVSSSSSSRAWRPPRSRRRRPARPSPPGPPHLPRRPSASSCRAACPTRPCSTRPPAPRTRCRTATAT

SEQ ID NO: 610 - protein, 123 aa, Homo sapiens
RHPGTAAGEAEEALEEEVAAWGEVAVVSSLGGEAGQPHHPRSRRSTPPTTRGARRRVERTKNALSRSTRSGLSRPPASSPRPWSPLLTRSPPRLPLPPTTRPARRRPLRAAGSQRGKSLPAIA

SEQ ID NO: 611 - protein, 176 aa, Homo sapiens
PPCPPPASWCRWPWAASPSGWSVRSWVRCWPSWAPVCCQLRSCCRHGVPAGTWPPVWPGCSSGWPRMRSRHPCPPEAPLLLTGPHWTYTGTCRKTRGRRTPACMGSRHQALTRPRRSWPTGHHSGSRVPNCGALGAGPGSPQLRSCRRPAAHHMGPWRRGWNLNLPPSPSSLCAVS

SEQ ID NO: 612 - protein, 145 aa, Homo sapiens
PPARERRGTLEPRPTAHRPGATSPTRVGCPARGCCAPKAEMQCGGGASGARETRGPRAPPGACPACPLRASRRCCPPSSSTLERVSPGGAGRLASSAPTWGCLCRAPPSRPSGRPRPDPALSLEAHTCWQRRTAAPGQPGRHRQG

SEQ ID NO: 613 - protein, 56 aa, Homo sapiens
LRIYLKQKETLIFSKPRPTRTGVSLRPRDPAPAAPKMAMTPAPGPTTSLTQRCCKP

SEQ ID NO: 614 - protein, 82 aa, Homo sapiens
FSPSPTMRTRSSARRAVRKRIFYQRLNLYSKKKEKKRFLSKPRPTRTGVSLRPRDPAPAAPKMAMTPAPGPTTSLTQRCCKP

SEQ ID NO: 615 - protein, 81 aa, Homo sapiens
FSPSPTMRTHSSARRAVRKRVFYQHPSLYLKTKRNHFLSKPRPTRTGVSLRPRDPAPAAPKMAMTPAPGPTTSLTQRCCKP

SEQ ID NO: 616 - protein, 79 aa, Homo sapiens
HRKWLPLRICCVMILLWLYVPVMKITKSLMTLLCLRTKPRPTRTGVSLRPRDPAPAAPKMAMTPAPGPTTSLTQRCCKP

SEQ ID NO: 617 - protein, 61 aa, Homo sapiens
GGRSFPDTPPRPHWTALEEGTAAWVLMLLLSSLSPPTSSISSLPAAPLPPPGELKIVLAAT

SEQ ID NO: 618 - protein, 375 aa, Homo sapiens
IHQYPNFSGAPDSFNSLHPGADSRPEWAIQPPVHLLHTSDPHGTSCAGTSDVSISCIQFSAWAAGQVPGSKRLPSSAALGPTPASLSPADDAGRRGCWPASGGCHALFFLHPLQPSAVPRPASHDAAHGPLPLTAGVCPHASEQPTHADVGQPSPGHRVILYPSVPFCRAAYPPSPLCHCSPVLPTPCHTAPCPPAAAGYHAYWKPAAVPACGPQSCPASGGAGPTLGQWTATAESVPPRGPDRHAALSATGTFCPVPSEQLPPASRCVCHPPPAAAPRLHQHGPCYPGPCPNWNHSSPAPSPWGSPPAPGDAAAPTPESWGAPPRRGAPEWGACTLSFHTLTLPLHRTPPSSISSLPAAPLPPPGELKIVLAAT

SEQ ID NO: 619 - protein, 34 aa, Homo sapiens
PRLSPDLAEVSSISSLPAAPLPPPGELKIVLAAT

SEQ ID NO: 620 - protein, 26 aa, Homo sapiens
QDSSISSLPAAPLPPPGELKIVLAAT

SEQ ID NO: 621 - protein, 337 aa, Homo sapiens
PRTGAGTAPQAAGSCGPCGANARGTAGEASRRGRAPACPRRAWRAAAARGCWRRVASATARPAAPLGAPAPGASPCGPQMPGGARSWGTSCSSLGSQPPRPVTQQPRSGPRGACAPAPAARAGRPARASACPPPTARSAADPCASSGCATTLPCAQCMVPGMSGRPGASAPAPVAVAFGIARAPAGPPSLGATPVRALRSKPSSATLPCALAGQWMETGMSGRAGAPAPPAAPRADSSARVNATGLPTGVRSARATGWRPETASCSSAQWMASGRPGRHGAVAASRVGLAASDGSVSALGPSSGEQPARAPRMSTGSAAPSGVPSPMRSVMRTTLVL

SEQ ID NO: 622 - protein, 136 aa, Homo sapiens
QKTVGPAPPASCSCPMMWHRGCSASVNGDAASGLWKGAEGVEYAGAVRPKRIVAIAPSAFALPALVSGASGNVSSDVAYGVNMPAAREAVTPRWLPGGAPEPSHCLHHPHHSPQSPQSRTPEPWPPRHLPSSSITV

SEQ ID NO: 623 - protein, 246 aa, Homo sapiens
LDTWALRVISPSSTSNKASCAIQPPRPIPWRLPARSERSLQGQPRLGNVRLDPRVVRSGRRPRGMRPRLTLTQPQLHSLLLGAVRTVESASQGMAPKGSGSKRCAKTVEHRELPSTGNRECLSCPMMWHRGCSASVNGDAASGLWKGAEGVEYAGAVRPKRIVAIAPSAFALPALVSGASGNVSSDVAYGVNMPAAREAVTPRWLPGGAPEPSHCLHHPHHSPQSPQSRTPEPWPPRHLPSSSITV

SEQ ID NO: 624 - protein, 222 aa, Homo sapiens
LDTWALRVISPSSTSNKASCAIQPPRPIPWRLPARSERSLQGQPRLGNVRLDPRVVRSGRRPRGMRPRLTLTQPQLHSLLLGAVRTVESASQGMAPKGSGSKRCAKTVEHRELPSTGNRECLRAEGVEYAGAVRPKRIVAIAPSAFALPALVSGASGNVSSDVAYGVNMPAAREAVTPRWLPGGAPEPSHCLHHPHHSPQSPQSRTPEPWPPRHLPSSSITV

SEQ ID NO: 625 - protein, 174 aa, Homo sapiens
QKTVGPAPPASCSCPMMWHRGCSASVNGDAASGLWKGAEGVEYAGAVRPKRIVAIAPSAFALPALVSGASGNVSSDVAYGVNMPAAREAVTPRWLPGGAPEPSHCLHHPHHSPQSPQSRSPTRTAGRTASAGPVQPAYGGWTVAAATSAATSPNSGAATRSARSVVGANACSLP

SEQ ID NO: 626 - protein, 161 aa, Homo sapiens
QKTVGPAPPASCSCPMMWHRGCSASVNGDAASGLWKGAEGVEYAGAVRPKRIVAIAPSAFALPALVSGASGNVSSDVAYGTLLTACVAVIRDVSDALPWLWLPQLVNMPAAREAVTPRWLPGGAPEPSHCLHHPHHSPQSPQSRTPEPWPPRHLPSSSITV

SEQ ID NO: 627 - protein, 157 aa, Homo sapiens
QKTVGPAPPASCSCPMMWHRGCSASVNGDAASGLWKGAEGVEYAGAVRPKRIVAIAPSAFALPALVSGASGNVSSDVAYGVNMPAAREAVTPRWLPGGAPEPSHCLHHPHHSPQSPQSRSGCCPVSGQSLRMGQDRPHLTVVERGPALPDGTILALP

SEQ ID NO: 628 - protein, 327 aa, Homo sapiens
TRSAACAVPATQEPTANMRQTPASRGPAYTGASAAPPTLASAAPASRASRARSARRWWIGAAASLVKTGVAASRLGPIAFVPLDGADASVTSEACPAGRPQPRSGCGWSSCVRRVGSVWMKTAPTTACAQRAVLVATVSRRWTPAWPSPASMGGPAVAIWGATCVSVFLATMVITVRTTWTSVPPSPASTGVHALTSWPAISAPVPQERWGCSARLMRMTAAQAHRWTQGPGAYTMAPAWTWWVVSAAPVPQDTLVCAARQTSMSVAQVPATRHTPGTACRTQAEVSVAFVMLASQVLAVRLSCLPASPSHASMEASAVLARVLGVG

SEQ ID NO: 629 - protein, 350 aa, Homo sapiens
CRARGDGSWGAAAAPRGGLAAKPGFRRLCRAPGAAGAARRRQRRRLCCCCWAVGCSASRPPRARTARSNCTVPMGQLRAQGSHMATPITPTARGPSPRKSSTESSLCSSPLPWKRTLMSCRCLMVHPSQRICVRGSQAFSCQPPLLVQPPPSLCASSATMQSVPKASTPPMKFSPATHVGTQGGCPMASSRVQPSTSVTRSATAATLASSWRATPCSPATLALRTAPRGTSPCLPAELMMPVVGPCGARVASSPAPTSPRSTITMPTAHGPSWLSWGTPSPWCLLTSSWRMVTTFWKSLGQKAPPSGSPEPASQPPLSAARTGCDCTSHRMATTGSADSVPNTKSRSKLS

SEQ ID NO: 630 - protein, 306 aa, Homo sapiens
ASPPALDGKFKATTQDQLARTARSNCTVPMGQLRAQGSHMATPITPTARGPSPRKSSTESSLCSSPLPWKRTLMSCRCLMVHPSQRICVRGSQAFSCQPPLLVQPPPSLCASSATMQSVPKASTPPMKFSPATHVGTQGGCPMASSRVQPSTSVTRSATAATLASSWRATPCSPATLALRTAPRGTSPCLPAELMMPVVGPCGARVASSPAPTSPRSTITMPTAHGPSWLSWGTPSPWCLLTSSWRMVTTFWKSLGQKAPPSGSPEPASQPPLSAARTGCDCTSHRMATTGSADSVPNTKSRSKLS

SEQ ID NO: 631 - protein, 169 aa, Homo sapiens
GVALLQPKSQSQMLGKSSRPVPQQSPGQWHFPLATLGTLLSLGRLGAESTARNPGGSWQGVHVSGAYHHMPPSPDSALLGDPTPTRTASLLWSQAATLRMDFTGVPCYHPPTEWLIPIAMATESPLSQMDGLEVSGAFPQLRPNANNRTAASMDTLRQTTSVPVVTGKN

SEQ ID NO: 632 - protein, 177 aa, Homo sapiens
PSYTGGRWSSTCGPCSVGACAAARRGPAAAWPAGSGRTRRNCRGCSGGWSPRPRGWMPWCPIWLKSCSWKTRPASRWRWECWCATTQTSGRSTWQPSSTSVACATQPPARRSWPWPGTWNSLRREPCHPLGTVPSLQTSLCPAHLSVSASLSSWAASPSPGWPGPVWPVCLGPGLRL

SEQ ID NO: 633 - protein, 65 aa, Homo sapiens
SVCPWGGQTSHWCPTQPRRVASRVWPSTTTLSCPPRSSTSCSTAATASTSPPPPAPSPCTPRAAE

SEQ ID NO: 634 - protein, 292 aa, Homo sapiens
SFSTNCVYIRTKSSTSWHHKPANSSRTPRDSRAFFALSEPYHSPSNCCCRSPPSSSTTTCSRTAPCTTAEFPSATLCSTCSRACSCGHPWVAYSFSNCWTPLTPTPTPSWSCPSSPSTTPSIHRTPRSTSTTPACCKFSTPTTPSAATFQCFGFWASYHISSSLTPPTSSRTSTFSFECSSNCTTVSLTSYTSYHFGTGTPAPAFWNRATLSITCHRSSSPAPRTKQYSNTYCFRVLSSSWLCGPATWGSRTSAGISSAWTDSNSQSTGATNISKQLPWVRVALKWTPKTFF

SEQ ID NO: 635 - protein, 186 aa, Homo sapiens
FLLRHSRLVGSGIDTGDSTTSSSRQPEGVRVTPCRPQPLSPPYSTGRAPHSSRGTGARTGMPPNPMNSTQPSTAGMKWCLPFHLLCRVPQAPYQPLQLPQLSLHPHLPPPDIANVAGLPASRRQGLGVEARVPRKRAEGVGEAATTTTTHCLQQASKSNSASSSMGIIANTMGTAILPVRMGAFGC

SEQ ID NO: 636 - protein, 84 aa, Homo sapiens
GCREINSQQIPSLFFRDPRDGIPGPQRPLPLRGIQGEVWQAQQEERVQRGAVGDREQPYCQGFRLSACAVSAAVLPEKELCGRA

SEQ ID NO: 637 - protein, 171 aa, Homo sapiens
MKMRNGSVTRTWMRTMAETLLPPEDSLRSCSWRQLPRGSPPVDGTAKAESSGMDPGGSQSTPIMSMPAMPWPQPPVPTTASSRACPAMQTPCPSRTAAWMGSPHTGSVSSTAGRCRRACRSMGGCPYLTFPARTGCRRRSAWSLRSSRRSSSTAWRLCSARGRPRRSWRSG

SEQ ID NO: 638 - protein, 128 aa, Homo sapiens
CQGQCQAAGTQAWRPKALPLWQLFRATSCPVPAHCQTQAPPCLQTPQPRAQARSPLCHLHSEEPARHLSPSPPVDITVPGTALPPPLGPSPAWRVHHYVRKAPSAPPKPSPCLTEACIFISDYSRTSV

SEQ ID NO: 639 - protein, 106 aa, Homo sapiens
CQGQCQAAGTQAWRTQAPPCLQTPQPRAQARSPLCHLHSEEPARHLSPSPPVDITVPGTALPPPLGPSPAWRVHHYVRKAPSAPPKPSPCLTEACIFISDYSRTSV

SEQ ID NO: 640 - protein, 179 aa, Homo sapiens
LTPSVLTSPLLLTCMGITTISRSPRALSPHLTCLCPWRTLYILTCRRPPPCHLPCLSGRGSDPPQPKALPLWQLFRATSCPVPAHCQTQAPPCLQTPQPRAQARSPLCHLHSEEPARHLSPSPPVDITVPGTALPPPLGPSPAWRVHHYVRKAPSAPPKPSPCLTEACIFISDYSRTSV

SEQ ID NO: 641 - protein, 59 aa, Homo sapiens
RPQAVEGTLFALLASVLLISELAFLESPPWTSKKQSADQCKEYLPMYCSILLEFPLQLE

SEQ ID NO: 642 - protein, 75 aa, Homo sapiens
VTPVQADGMKEACLRDPDHGPIMDIIQTLVQQDTLATIKNAEKKKRLSIKRKGKSRNTAEDTNKQRREGFLYRLT

SEQ ID NO: 643 - protein, 35 aa, Homo sapiens
DQAQCPPVRRGGDVCGNAGPETSVAERELERDLLG

SEQ ID NO: 644 - protein, 166 aa, Homo sapiens
GWRGHSEAWRTKGSGEERKRSGLLQAHCWHFTTISRHQQEGGMENAPLPHTVPATRFFFRPSTKKTPSEMAVGGLSPLQDPSPGHGNTQAFLAPLLAGGELLCSSKFIEGLKAGVRGAWRSCHHPVPLCPLICQQAPEEVLVPSGAPKMDLPDHCVHQPVYSPSLS

SEQ ID NO: 645 - protein, 224 aa, Homo sapiens
GHLAASRLGLAIAPRTVGTWPRCQWHWGVPPRGTGSTYPSQGRSWTRPACTTTDTSTTTSTTAQPGPRSRWRPRPPAGPRAASPGAWNHTAMGQGPEATQRVLALPPTPVMASPTVGRWAWRAKEMPRRLSRGRAPAPRCQVPRRMRRRTRKSCSGSLRGKRRSAGTAGPATGLRGRGSHSPMRTPDPCPLSTPGPALSSGPPCSPPTSSSKTPPCHPTQLPTP

SEQ ID NO: 646 - protein, 51 aa, Homo sapiens
LGTDPEQPPDVIGGYREGQLVGGTAPVLVEDAGSGLDQLPSGEEQVRRKRH

SEQ ID NO: 647 - protein, 48 aa, Homo sapiens
IENPTNKLKKDLKIFYIQKKTQKNFFGTLRRTSNQLRSAGYQQRRQNK

SEQ ID NO: 648 - protein, 208 aa, Homo sapiens
TCHQWGTPTPAAPPTATTALRTPSTSQSSPTTHCQDPLSTPSAPGSRRRVPGISTSAFPLALVAFSMLQQQMILPLPPAATAWVGDTAGLGWSPAFHIPTIRFCSPICLERWTQLLRPIAAWPGPRGCPWGIPRPAPYLGPESSSSSSSPCCTLQSPRARGNMSILNLGVISLATCLARWLSTAHLLSGVHPSSSQLPERKRLALRST

SEQ ID NO: 649 - protein, 66 aa, Homo sapiens
APATTASSSSTRPNRSPTAPSTSHTTAPPTRPSPAHSTTTPTTRTPAPTTATRQARAPASTPPSPT

SEQ ID NO: 650 - protein, 50 aa, Homo sapiens
KEKKRGRKKGYRNLRKAIEKKEVWLVKRIIQTLTKRRKKKRVFRKEKTMN

SEQ ID NO: 651 - protein, 51 aa, Homo sapiens
RTGCKKERNTRPLKNCGEASERQKNDAIKSELKGQRGNVCQKGKERCFALK

SEQ ID NO: 652 - protein, 32 aa, Homo sapiens
NGSWIYACSSLWFYTSNVKLPLAKTVSKWKRC

SEQ ID NO: 653 - protein, 32 aa, Homo sapiens
PRMELRVQRPSRRAASFHLALAQHRATGTSRS

SEQ ID NO: 654 - protein, 38 aa, Homo sapiens
TQWVDLCQKNQFQMWISISLTSALAVAMLSFQYLCPCL

SEQ ID NO: 655 - protein, 47 aa, Homo sapiens
PYASINRESYAKKMSQKSQKKKSARTALNSELDVQNAVHENQKERVF

SEQ ID NO: 656 - protein, 92 aa, Homo sapiens
RHVLPGDTAEDQPSACRDPAGNPGGTDQHRHGLGLEPCLFGGQWEVALQEGPQQEGQVTFRATDIPETVLPDTVRVCWDLQLNVRVGPNKYK

SEQ ID NO: 657 - protein, 76 aa, Homo sapiens
DPFPLYLEKNGKRRLIETSLSFGKTSLMIMKFVTSFLTETSLMKVHQENGFGSLYFIHLESWALTILKDSGYFRLQ

SEQ ID NO: 658 - protein, 28 aa, Homo sapiens
GGRRMIWTSLPNLPDSSSALTQRQTNAM

SEQ ID NO: 659 - protein, 47 aa, Homo sapiens
NLLVVPLQAGGPQARLAPQKRGGLLHAVQEKLEEALVCPPPVQADVL

SEQ ID NO: 660 - protein, 78 aa, Homo sapiens
VPQRSQIWLFLSLGQNSLPKMIVPIQWKWLMAWKRRTSLLKKHLLGISLCFLENLDSRQKFPFDLIIMANMYQWIRVR

SEQ ID NO: 661 - protein, 13 aa, Homo sapiens
SGGAPCPQSSGGG

SEQ ID NO: 662 - protein, 66 aa, Homo sapiens
SLLLLAVGPLQEVWALLNRLGRQGQLQGHSSSNQLEPPSLGQSHQGFPPLDPMAPHRSPTNKLLPQ

SEQ ID NO: 663 - protein, 76 aa, Homo sapiens
GNSRATQTEPAVLTFLMMAPSSGRVVWTTQSGPGTCARGGSCSSTTSPPRSSPWGTAPPGSGWQWAWRAAMWRCCT

SEQ ID NO: 664 - protein, 181 aa, Homo sapiens
PSRRRSMSTTTTSTTMPSPRPRRRSRRRPRSGCTASALGAASITATRNAKATPRLRKPCPASSLAAAEAVPCPNAMGKARSRAWPCPPGKEGPPAELGPCSFPGRKETGRRMSGSGCWRVSGRASPSPIVPKAQKRPTPWSLPARLQANEPAGTICGGATAGTPAPPPVPTCSPRTLRCLP

SEQ ID NO: 665 - protein, 103 aa, Homo sapiens
RTTASYRSLSFSSCCARPNSSSGLASPTRAPPPWRPSPMVASSCSPASARPTAPSTTSSSEASPPPERCSPSIPTRRTSSASPTCGQSTTTTQRSLKQPSRPL

SEQ ID NO: 666 - protein, 102 aa, Homo sapiens
PKPPPPPALGRSAAASQSPRGWTQLAPNCNLCRDFSNRLLRPPLCGPLTPFPVPRPSSPPPKKTCSKATFGTSLSPFATPTRSGTCCWAWTAPTAWTVAWTP

SEQ ID NO: 667 - protein, 35 aa, Homo sapiens
RPHKKDHLMMLKENKRERLSLQQKAQLIKTRPSWN

SEQ ID NO: 668 - protein, 194 aa, Homo sapiens
KQQNGPPARTTTCQPPRALRRPGMRTSSPTPSLLLTLCHDREGPRAQPGPRGRQDHQGLQAPPGLKVTEARQERRVQRGRLGSWGLQGPVGFLERWGAPAPQDHPAQQATQAPHQTAPRAPSTPCSRLQTKTMETQGWPLPSWTQCWQVSQDPGVPLVHQVPLGLEVPQDPQEHLDPRAWLESEAQWGRPVNLA

SEQ ID NO: 669 - protein, 83 aa, Homo sapiens
VCTTAPRGTSSATSSSQPQGHPAWRSCTATPGRACKPCAENTGAGAIAESKEQLPPFPLQLLHCQPTLQLTARGGVSLRTVTF

SEQ ID NO: 670 - protein, 135 aa, Homo sapiens
SLSVHAASCPRRLVPCMCCCPLGAPGPPSAYLSPLGTTWLRTCACRLPRPAASCLCTTPSLLWPRRTCPAGSPRATSSPWRMPAPKSCCTGFAFTSPIGLGWRSATASGYARIWPVLSLTCQSWSTSLPSTAVTW

SEQ ID NO: 671 - protein, 75 aa, Homo sapiens
SMTETLWAPSPLCLRAYPPATMTHPRTATSLDIMTCLQYGIPHHLHFDARTVEEPGWYGRGQHTWLLLLKAGDRA

SEQ ID NO: 672 - protein, 44 aa, Homo sapiens
WQVQTGDMMTKMVLNNGASCIPLPMEITSPLLILKPVKPNMTPL

SEQ ID NO: 673 - protein, 150 aa, Homo sapiens
ACFTISGALHPRTFLCRCPTAPMGRASRGSPLWQKSLHISSTSQCCSPPRRPCRSIKGAWLCCLQSRTTRLTRPSTTTFLSCSPPAAPLHPSTMGSRSPPLQGRAPQPRSWTGTRRRRKRRMMKMEKMRRKSPSASGKGSRPFLKLTRNT

SEQ ID NO: 674 - protein, 69 aa, Homo sapiens
RTWCCVCWSWAAGRGALVLRRPHSCSWRRRSRRRCGGSWPCPRPTPRRQRPPGASPATSATWTRWCRAL

SEQ ID NO: 675 - protein, 90 aa, Homo sapiens
TPFLSRPSIASLSISGTCFRSPRCPPSSSSFWWAALPRRPCCSRRCRLLLGTSAGSSSPRTWASPSSRVPSSLAWTPRSSRCAGRRSPTG

SEQ ID NO: 676 - protein, 53 aa, Homo sapiens
SHGRISYLAKLWKLSQVFLLSVPIRYFCSCKKNHYSERLRATDDKHRKAKSGG

SEQ ID NO: 677 - protein, 51 aa, Homo sapiens
CYHFCFFPPCFLPYLLKLRSSIGSATHPMQVFHTPTVIKCNTQFQLMLTPV

SEQ ID NO: 678 - protein, 40 aa, Homo sapiens
CYHFCFFPPCFLPYLLKLRSSIGSATHPMQVFHTPTVGEI

SEQ ID NO: 679 - protein, 217 aa, Homo sapiens
TPSMVSSSRILQYYKVHRAPGVQEVTEDPRDPLAQLATRDRKERRGSLDHLALRVREAQLDQLVPPESVAAKDLKAPRAPKAPVVPLGSPALRAPVGTQAPRAHQAKRDSPALRALLASRDFRAPLGSLGCLDLGDCQACLGYQACQAPRAPPALLAHQERWCPWPCRMSQPRHRRTMAARLTGRTSQTNATIFQLRKKFLRMQSFSVKTSLHILFS

SEQ ID NO: 680 - protein, 63 aa, Homo sapiens
PLELSSTLSFTNRHKHESSTNVQLSSRQYQQFTLRCCLTHSSHQWIRQHSRNQRECCWKLTDR

SEQ ID NO: 681 - protein, 99 aa, Homo sapiens
GKTVYAPSPNSDDFNRESPSYPSPKPPTSMFASTFFMQELSSTLSFTNRHKHESSTNVQLSSRQYQQFTLRCCLTHSSHQWIRQHSRNQRECCWKLTDR

SEQ ID NO: 682 - protein, 29 aa, Homo sapiens
KNCSTTRATGAGGKKHSSCGFCCERGHKR

SEQ ID NO: 683 - protein, 57 aa, Homo sapiens
VSIPPCKAFQISQEGRCKQKKEKQPTTKDNQGSQQKCGISQDFKPWKIKAINSRKRC

SEQ ID NO: 684 - protein, 68 aa, Homo sapiens
PLLTSAASSKLLTSSWPTSKCSVVRTSSGPCTSSKDTMQSPERPCLMPLKNGRSCHQKPVEKGRRENK

SEQ ID NO: 685 - protein, 65 aa, Homo sapiens
RSLGKVVSTVTLMMTVRPKKFLRRGKKRLPGLTCKVRRTLHQLKLCQRVMILSVVFQILMTCQWP

SEQ ID NO: 686 - protein, 263 aa, Homo sapiens
CAVGAHWWPLRAWRATAGPHLHPHPAAAPPVPQAGLARSPAAGAAPLSPSQSPRRCRTTSALSETCSHPPSSKHLGPLPSAGQAAPAPWALQGPAPRPLPTLSMEASWPGRCLWVEAGPTRHLLKLEPSLSGQAGAGRPPHRELRCGVAGPLVQAPLHPSTLPALPGWAAACTAPPTCLTCTSSAPSCPNPPRTPWELCSAHHRPALPSRPTACSPAGTCGAHPSCPTSCSETPCPPSWAPPPRLCPPLTSRRPPAPRTCWPS

SEQ ID NO: 687 - protein, 108 aa, Homo sapiens
AYPRRCQHEPPLHAAFHRAEPRQDERGVAAGRPGRRRCPGRQAEERRPQHGGGAGRPPGRAGAHRQPQLPLLRAAYALALQQDPAHRFQGGGPRGCSRWHSGHCDGWQ

SEQ ID NO: 688 - protein, 107 aa, Homo sapiens
RRPRCQHEPPLHAAFHRAEPRQDERGVAAGRPGRRRCPGRQAEERRPQHGGGAGRPPGRAGAHRQPQLPLLRAAYALALQQDPAHRFQGGGPRGCSRWHSGHCDGWQ

SEQ ID NO: 689 - protein, 69 aa, Homo sapiens
QMPILYQGGLQFVSTSEVSAWPNWIMLTFFMLMPGPPISHGGENLPQKKDLLLLLQKDRPFCWIKAPLF

SEQ ID NO: 690 - protein, 33 aa, Homo sapiens
GKNYMNITLSFKKKVENMIDYMKNIPAHPRKSK

SEQ ID NO: 691 - protein, 227 aa, Homo sapiens
LWGKNPIIRKNPTNVVHAKRPFIIDHCSFNIKELILKKNLMNVMNVGKHSASLHISVSTKKSTLEKNPINVMNVERPSLLLHHLWYIREFTLKRNLISVMCVGNLLASVPVLISTREFKLERNPINVVNAGKLLVINQNLQDIRKLTMVRNPTNVMIVGKPLGTSHILVYIRRPTLKRNHISATSVGSLLRIPQFLMCIRGFILERNLLDVTNVEKPIEVIQALSYI

SEQ ID NO: 692 - protein, 36 aa, Homo sapiens
GCILEKNPINVMNVEKPSGVVRALLYIKEYIKEKLS

SEQ ID NO: 693 - protein, 268 aa, Homo sapiens
LIIREFILEKNLIYAMNVGRLSVRVHTFFSIKKYILGRNHINAMNVGKCLVRVLTLFDIREFILERSVINVMNVEKPLLIPQPLFNIKPLTLERNPIYVIYVGKPSARVQILLNIIEHILERNHINAVCVGKHSARVCTLLNIRGFIMEKNPLNAIYVGKHIDKAQILLSIKGFILEKNPINVMNVGKLSFIPHHLINIRELILERDPINVMNVIRILAREHALFNTREFTQERNPMHVVYVVKPSPRVQTLFSINVFIQVPNIVING

SEQ ID NO: 694 - protein, 52 aa, Homo sapiens
EFILERHPMNVRNVGRHSDISLLFGAMKKITLERNPTNVNSVEKPLYITSLF

SEQ ID NO: 695 - protein, 67 aa, Homo sapiens
ETTSSLVDLQIGHSKCGMQRLENVYTPYMGILPLCVVCIFMKKELLAVLEMPLLGFGILRQASVYMF

SEQ ID NO: 696 - protein, 19 aa, Homo sapiens
NKKRQKKHFIQIKLLNYLM

SEQ ID NO: 697 - protein, 44 aa, Homo sapiens
KQIFCSMLPPGPLPCHQYLTFLEALTSFLVHPYGFLEGTSIFHP

SEQ ID NO: 698 - protein, 190 aa, Homo sapiens
MTKSSPLWAEAPTSECIQAIGLASAATAPAARATGSPAGFPMGATTGQREPWRGGDWPTGAMRDPPRATPRPRWRRGASADRCQRGYTPTHLRWGNQPLGTLATAPQATGRWSSWRTLGCLPYTHAQPARRSWRCLQQPCMDCGWRGRLEKGGQVRLASLSCTQCGLGTRCLCSCLPVGITMPRCLTTAA

SEQ ID NO: 699 - protein, 187 aa, Homo sapiens
NQIRKKKKEGIQDQDHVLGGGGLPHLLDTGGQEADRDGGHILSLGVGDDPKAQGGEDLIPEKEVEGQGAHQKQETKRKKTKKRNVLKHHQKVTAQPDVLEVQAVCTFVILERDDDEEAGVAQDLLKSLGLLKENCPAHHPLGDIKRRRRKIKTKKEVGMKENDQQARRRRVKIRKRTGKENQRVIKM

SEQ ID NO: 700 - protein, 180 aa, Homo sapiens
NQIRKKKKEGIQDQDHVLGGGGLPHLLDTGGQEADRDGGHILSLGVGDDPKAQGGEDLIPEKEVEGQGAHQKQETKRKKTKKRNVLKHHQKVTAQPDVLEVQAERDDDEEAGVAQDLLKSLGLLKENCPAHHPLGDIKRRRRKIKTKKEVGMKENDQQARRRRVKIRKRTGKENQRVIKM

SEQ ID NO: 701 - protein, 110 aa, Homo sapiens
IDWRRKKRKKIEKRKSFRRAEVNTKNISPLLPHLPPPPPLPLLRLQKAVVRVRVTIKKKKYKGRKERKTSVQGITTVILKRRTSLRRESFMKNFLAVTITGKKPRKSPGS

SEQ ID NO: 702 - protein, 39 aa, Homo sapiens
VGASWVAEALWGKRGVPSWGPPHITHPVGRKRPRVAGLA

SEQ ID NO: 703 - protein, 29 aa, Homo sapiens
SSRPGSANGVSMDGGRKGSLLIWVLQQLE

SEQ ID NO: 704 - protein, 100 aa, Homo sapiens
WQPRILEEVLLQHLAVRLRMRTAWTFPWTFLHPLAQAREGEGATYPRSLCRFFGIGCMSTVTMPILQSKKKRCCPSKHTCLRYRSVTGSSTPAAGSSLTC

SEQ ID NO: 705 - protein, 96 aa, Homo sapiens
KARKVLLQHLAVRLRMRTAWTFPWTFLHPLAQAREGEGATYPRSLCRFFGIGCMSTVTMPILQSKKKRCCPSKHTCLRYRSVTGSSTPAAGSSLTC

SEQ ID NO: 706 - protein, 96 aa, Homo sapiens
LLAKVLLQHLAVRLRMRTAWTFPWTFLHPLAQAREGEGATYPRSLCRFFGIGCMSTVTMPILQSKKKRCCPSKHTCLRYRSVTGSSTPAAGSSLTC

SEQ ID NO: 707 - protein, 93 aa, Homo sapiens
KVLLQHLAVRLRMRTAWTFPWTFLHPLAQAREGEGATYPRSLCRFFGIGCMSTVTMPILQSKKKRCCPSKHTCLRYRSVTGSSTPAAGSSLTC

SEQ ID NO: 708 - protein, 77 aa, Homo sapiens
WTFPWTFLHPLAQAREGEGATYPRSLCRFFGIGCMSTVTMPILQSKKKRCCPSKHTCLRYRSVTGSSTPAAGSSLTC

SEQ ID NO: 709 - protein, 36 aa, Homo sapiens
IISVYLLNQKKRNKKTKLWFSLINIHHRKNPLLPMR

SEQ ID NO: 710 - protein, 33 aa, Homo sapiens
ERKNNIFFLHILSQSILLIQSQSLKKTYDWSGV

SEQ ID NO: 711 - protein, 21 aa, Homo sapiens
ISWPGMGFFWHLNWKTLNASS

SEQ ID NO: 712 - protein, 17 aa, Homo sapiens
VSWMKKIHQSEPTKCAM

SEQ ID NO: 713 - protein, 223 aa, Homo sapiens
LFTQELISSACRGALEDTIAQAPSWQLTEPNKCLDPKCLRPGTTWAQQLLLQGHQSMDNSKAVLVVPMGLLSPHLTMGPHSQLIVLVSSSELLRHSLQCSTYLSHSHSPMLCMATFSPLRQVSSSLVVPCPCKSRWNMLTSRLASPTHPLCAPCTPRLCIQPLDSLLPPSSLCRCSQQESRALQLPANLALGSPSSNTARTRDSTTSDHQIISSTPHPPPHRG

SEQ ID NO: 714 - protein, 45 aa, Homo sapiens
MTTPLCLSTVNMVPPCLRTFLLELKFFKCMQQVGILKQMQKSPTQ

SEQ ID NO: 715 - protein, 51 aa, Homo sapiens
SPRNQFLMIKRSQMMIKKRERELFQLGNPKRKKRKRRSKVKITLLHRTQKN

SEQ ID NO: 716 - protein, 83 aa, Homo sapiens
APASWGCPRLQGRSARRRPRPAWCSHRRVTWRPCIPRYPPTPTAATSTQSPCLSTTPRAIPGSPIPPRITNRPSRRWTAISSP

SEQ ID NO: 717 - protein, 21 aa, Homo sapiens
QPSSKRSLAETKGDIKRMDST

SEQ ID NO: 718 - protein, 28 aa, Homo sapiens
EKKFDLVAKKHNGYVLQKKLHFTFYTCL

SEQ ID NO: 719 - protein, 114 aa, Homo sapiens
AVKIQKILIFRNQELVKKLVNPKMNSGPEQGLQRKQSWKKISGAINRKRKGDVLRFKKIHPVKTRVILRKKRRKKKRRRKRRRRRKRRRKMKMMIPSLLEKAERKFGRFLKMIN

SEQ ID NO: 720 - protein, 65 aa, Homo sapiens
RRLNRPGRMPTRMSVPAHRVQRWFQLMKKRTKLWRRCPESCPGLKRRKKMRRRKRKRRRRRKRRR

SEQ ID NO: 721 - protein, 35 aa, Homo sapiens
ENSSKKRNAKNGRIDEKISVCVIFLLPYKQQMKRK

SEQ ID NO: 722 - protein, 60 aa, Homo sapiens
RRNTLSRVALVFIVRLDSLTPGLPGVRVTRVAINPSVVRFVTTLPLPKATSVFICSRTST

SEQ ID NO: 723 - protein, 132 aa, Homo sapiens
RRSTRSRGAPVSTAKAGSPTPGWHEARATRVVTSLSAARCVTTPQLPKATSVFICSLTSISTTCRTCRMEGGSRSSATLPGRRRRRWLRRRRQPISVAPAGPPRRPNQKPNPPGGARCVIMRPTWPGTSAFT

SEQ ID NO: 724 - protein, 128 aa, Homo sapiens
PRAVSPSVPGQSGWTTATPCRGPLAGTLTPTPTSVRPEGPSVSSPWASSAVPRPSLVSPWGSWARSWNAAWTLAWSAGTVSRWGSSRCASTMKSVCSAATTATAPAPRPPALRPCPPPLRGRPGSSQS

SEQ ID NO: 725 - protein, 128 aa, Homo sapiens
PRAVSPSVPGQSGWTTATPCRGPLAGTLTPTPTSVRPEGQSVSSPWASSAVPRPSLVSPCGSWARSWNAAWTLAWSAGTVSRWGSSRCASTMKSVCSAATTATAPAPRPPALRPRPPQLRGRPGSSQS

SEQ ID NO: 726 - protein, 128 aa, Homo sapiens
PWAVSPSVPGQSGWTTATPCRGPLAGTLTPTPTSVRPEGPSVSSPWASSAVPRPSLVSPCGSWARSWNAAWTLAWSAGTVSRWGSSRCASTMKSVCSAATTATAPAPRPPALRPCPPPLRGRPGSSQS

SEQ ID NO: 727 - protein, 28 aa, Homo sapiens
PRRPPRQGPPVPCPPPPPLRGRPGSSQS

SEQ ID NO: 728 - protein, 28 aa, Homo sapiens
PRRPPRQGPPVPRPPPPPLRGRPGSSQS

SEQ ID NO: 729 - protein, 74 aa, Homo sapiens
PARTKTRQAGSTCASTTTCVCFAVTTTATAPVPQPPAPRPRPPQLRGRPGSSQSRPQQPLRLRPLDPRPPRPPP

SEQ ID NO: 730 - protein, 34 aa, Homo sapiens
AACLSWPCPMDSMKMALRAQGGMRMMMRRTRTSC

SEQ ID NO: 731 - protein, 143 aa, Homo sapiens
LNIKEFILVRGLMNVRFVARPLGYNDILVNIRKFILVSNPINVMNVGRPLVMAHTLFNIRKFILVKNPTNVKNVVSPLVFMQNLLDIVEFILVRNPMNVENVEKPFVFKRNLLGIIELILVRNPMNVRNVGRPLFVVINLLYI

SEQ ID NO: 732 - protein, 27 aa, Homo sapiens
KIKVERNPMNVRNVGRPLVVPRPLEHM

SEQ ID NO: 733 - protein, 80 aa, Homo sapiens
RFTSERQTMNVKNVGKVLVVPHRSQNTKEFTVEISLMNVRNVGRPSVVPPHSPNTKEFTVEISHMNVRNVGRPLALPLTL

SEQ ID NO: 734 - protein, 162 aa, Homo sapiens
FTQVRNSVEIKNVGIPFFLIQKLFNIRQFTLLRKHMNVKNVGSLLVYVRVLLVIREFIPVRNLLNVRIVGKPLDFIHNLVSISEFILVRNLMNVRNVGRPLVVAQILLDIREFILVKNPMNVMNVERPLVSDHILLNIREFTLVKNLMNVRSVGKLLLVDHT

SEQ ID NO: 735 - protein, 204 aa, Homo sapiens
CTVGMDLINVSFVGKLSIVSDYILSMKELTLERNRMNVNNVLNPLVILLPIEYMKELTLEKSLMNVSNVGKHSIVPVLFKHIKEPTLGESHMNVNNVANPSVGVIPFKYMKELTLGRSPVNVANVIKHSVVTDPILDIKGVTRERSLINVRNVEKHSRIPVPFVDMKGPTLRKNLMNVSSVGKHYLISFQTHLRMRSGERPYKC

SEQ ID NO: 736 - protein, 99 aa, Homo sapiens
VFHPLIGTSEPLVIPVALQYMEELTLGKSLMNVRNVGKHSGFPVLFVDMKESTLQKNPMNVSSVGKHSVFPVLFVDMKESTLQKNPMNVSSVGKHYLIL

SEQ ID NO: 737 - protein, 60 aa, Homo sapiens
SWASSSFEGFWISSFPSTTWPGLTTSSQRRKKRRQTRRGREKKGPTRTVMRSPSSLLPRL

SEQ ID NO: 738 - protein, 97 aa, Homo sapiens
LTMKTCPFLANILYSLKNFMIERKSLNVKSVEKSSVTIYFLVTTKELILKNFLNVKNAQKLLIHHAFLNNRQFKMVTNAMSVKNVGRPLFIAHNLNI

SEQ ID NO: 739 - protein, 79 aa, Homo sapiens
EPTLERNPMNAVTVEKPSSISHPLRNTHALTLERSLMSVTSVESPSAQALTLLCTRELTLVRKPMSVKNVGRPLGIPLA

SEQ ID NO: 740 - protein, 22 aa, Homo sapiens
RGGHHCHRRGGWPGWRWRRGHR

SEQ ID NO: 741 - protein, 16 aa, Homo sapiens
ILCQKKPRHWISCLKK

SEQ ID NO: 742 - protein, 163 aa, Homo sapiens
RSPRRIAAARRQAPRGRRRLPGPGRSGQPRFLAPRPPRQPHHPLPSLRTRRPWTAAARHLRSPSCPRRPLRRLGSEVGRRRRRRKKKRRRKRKRRRSSSLLPPRPPALLQPPQALPPARGPQPVTRGRRTGQLPVSPSCPRCPRPCPGICQLVWTAPPAASWP

SEQ ID NO: 743 - protein, 149 aa, Homo sapiens
PALQQSHQRHQHGLRPAPREPLASGAVPVWPTPGRSTGRLFSRRGPVRLPGAPRRPGPIVRSAARGVRLPGKPPLVSPGPGQPWSSSRGRSGSGGALGETGGATRTTLCDRLRGLRRGRPVPGRANSFASPDGGHRWARSRSPRRTLGD

SEQ ID NO: 744 - protein, 138 aa, Homo sapiens
SWRCSSLARPTGTSRAVTWRARAAATRRPRCRRRETTPWAQMGTARPTARPRAAAPEIRRATANRVREAGRARRRRSRQQLLQRWWRRARRPGRRGQARAARGAARVHAASHIRGGPSPPTRTSRSSPWPSATRRAGA

SEQ ID NO: 745 - protein, 54 aa, Homo sapiens
APWRTRRPTWAAAARAAAATPRRSSAATRTPSRPTRTSRSSPWPSSRRPARCSR

SEQ ID NO: 746 - protein, 109 aa, Homo sapiens
SSRSSRGCRWPGGAGLRFPESTSRAAARATPQSLAPSSGHRQGLRRPLKMPGSRQSPPTRTSRSSPWPSCKARTSASRSAASAPSLVAASPTTAASSPPGRTASATTSR

SEQ ID NO: 747 - protein, 108 aa, Homo sapiens
QGYRLGRSSLQSPQPLCGGGRPVMDSMRTSLQKPHPLVALGFAPLSSVSPRSWLLPSLSILEGGPKSPICTATRRPSRRWREPPRAAHHPVGCGPPRVWPRHPCLLWA

SEQ ID NO: 748 - protein, 33 aa, Homo sapiens
VRTGWGCPSEPMRQQGLPPPLRPSGQRAAEPRL

SEQ ID NO: 749 - protein, 67 aa, Homo sapiens
VGSIQETDNSLVKSSPSWPTKLLQPQGFLLFRRHVRTGWGCPSEPMRQQGLPPPLRPSGQRAAEPRL

SEQ ID NO: 750 - protein, 125 aa, Homo sapiens
DGAIGAAARASSSNNSSSSSSSSSSSSPCPAAARRRKMRRRRKRRRRRRRRSRRWRTTRKTSSRRRQTTPQGRTTTRRRLWPPKAAKLPTAREDAKAASPAQWLMRPTARRPSPPSRAPSWPPWS

SEQ ID NO: 751 - protein, 28 aa, Homo sapiens
GAMQNSCTKLACWMRSKKSTSRSSAMNA

SEQ ID NO: 752 - protein, 12 aa, Homo sapiens
WGTCWGKALTAR

SEQ ID NO: 753 - protein, 15 aa, Homo sapiens
KMEVYVIKKSIAFAV

SEQ ID NO: 754 - protein, 14 aa, Homo sapiens
PLPPAAAAAAAATT

SEQ ID NO: 755 - protein, 42 aa, Homo sapiens
KQLGIFLKRKKTRMFIPAAAAPPPAQWETPAHTTLLLKAPTL

SEQ ID NO: 756 - protein, 51 aa, Homo sapiens
GSGKPRTGQAHGTKPEPPAQREVLPHQSAPDPGGLPAPSQAAADELDRRPG

SEQ ID NO: 757 - protein, 246 aa, Homo sapiens
CPALDTPAQHLGLHAWDRGSGQQSYVWRHMINHLSPHQAAAPVDQTPRTLATMGQRALPSSLALLSRPLSPPPAACSGDPGCGSGAGLPSASAAAGIASSAVEPVCGDAAPACLLRTPLRGLLKPTGPRSTMECPPALIVHPPAGGMASGSSQPWAAASATPMLSSKASLCIPTRGPPPQPLMRTPAARSHWPIPHPCDTACPAPLPVVLVAPRSTILSMSRTWTCRRWAVAPCRAEKLMCSSSRS

SEQ ID NO: 758 - protein, 330 aa, Homo sapiens
DPDPQVRLQSVPSRPLGARVGRLPRLPRVPLSTPELGRHPRPLYAQLSGRTFLQGGAVEATRAAGAGRRALRAGVASQLWDSAHRVRGCPCTRRGAAATGGTPARALQLLALDGAPPLPPAGLRTAHCGRRRMAKAPQSPGPAPPPASSGRPLRRNPEQRSLRPCAASEAPAGTWHGAARPGSGRGGGILQVRTGRHRRGSARLALGLPGGSSATRHGDLHPRCGLGVCVHAVDHGDAPLAAPPCAWALGPPLPRLGPDVCICSEARGAARGRGSHEERRTAREGPGVWGAPDPLPVPGRVACPVHPGKCDRVAIGGSGHGVQHALLGSV

SEQ ID NO: 759 - protein, 175 aa, Homo sapiens
APRAPGSSCSLWQRLWFRPILLCVLACFLLSLGSHLLLTGLRNLQGPGVWSGQHSGPPTAPTPWGWGSSDTFQGNPVPPNGSCHLPAQETRKCGWPGATRPLSHRGPSQRRRKHPADTGAAPKQGGARGRRSQSALRPRPITGLWGPSSSPVPSCRHHGHQCGAACQQHSCAHRL

SEQ ID NO: 760 - protein, 137 aa, Homo sapiens
RQRDGHQPQRGDQDADVHLEQHLLQPGLRRPRPLQGLRGGRGGLRGAHQRPEWRPHVQRGGRGGAVHAGHGGGGLPRLPGHGPVHHPRHPGAGPGAERHLRLHRLRQDRGVTPAVPGAAGAHESAPQDPAAPGAQRP

SEQ ID NO: 761 - protein, 151 aa, Homo sapiens
PASKPGRAAPAPAAAPGRAPCPTAASARTSAPCTYPCRAPASLFCLPSSECQQQPYPCQRGQEPPAQLTHSGQTNLPLDERVSTKHKAENQQLQLRRKLRWRQEPAGAGFVQARAHGLHERAAGGAGERVPLQPLPVPAAPGGDGQSAEPH

SEQ ID NO: 762 - protein, 28 aa, Homo sapiens
LAGHGRGPGSGRGGAGAAGGGGAAQRTE

SEQ ID NO: 763 - protein, 271 aa, Homo sapiens
PHPPRMLAHLSRAAPCPLAAGAVAAVAVAVTRSLTAQSLRTARQSQSSGRLCTAGACWTAPAWPCARSSSSACPATPWPPCWGPGGFPAPQIPPASTIALGATCWAPRAEMALAGPSGCCPQWSGCSMGCWCSSPWCFSLSTVSQSHGPTQAPPCTSGGIASRLTWTWPGETLPRLPSSCGWPCGHWAGPCPPPTWTWLVASSGTSSVTCCSVSGWAAGWQAGQGACSRTVLCEWMLAPAPETQPWSTISCTSCTPWGSTQAGTSLPPTWR

SEQ ID NO: 764 - protein, 45 aa, Homo sapiens
WMGSFPSSATCGPWIDVTHHTVKKSRISGSKLAAIDPSPLTIYST

SEQ ID NO: 765 - protein, 115 aa, Homo sapiens
MGRAQLVGPQVPRKPPPGRRARGPGAVATSLLRRPRRTTSASQGASPRTPLENLPWLPLLKNLLAERTSRSSPVRGPVTGLKAALLKRSPVGPGCPLKPTGRWLGRSATSTGSVG

SEQ ID NO: 766 - protein, 100 aa, Homo sapiens
IWRRCPVSRSLMDMESGWPHPLLFSASQGASPRTPLENLPWLPLLKNLLAERTSRSSPVRGPVTGLKAALLKRSPVGPGCPLKPTGRWLGRSATSTGSVG

SEQ ID NO: 767 - protein, 73 aa, Homo sapiens
PNTKMAGPRREMARRAPNRRRTTPRILQKIPIRTPQRMIAPVSARRAGLTKPRVQILVPLMMAALSCSRSGQS

SEQ ID NO: 768 - protein, 122 aa, Homo sapiens
RWAPVGEKPEPAENPRGLSRRVWRSHQVLSFRRPPGPGCGSQRPGRTTSAPVSSATKASMGRAMPARPWTASTTPSALFAALVGELCVARLSTVSMALCTVRKIICFQGFRRQLRNAVSVVT

SEQ ID NO: 769 - protein, 282 aa, Homo sapiens
LAPAAATVLRPCWWTGPLVGELAPRLPLWLPLPLAPQSARAVRCCMSAPNQPLPSPPAQQAPQTLPGPPGLAQLPLPPEVPPGSHLCVETSSWTIPWTGACPAVAVEQAGGSCRLQLRSQDPSPAGMGSSPCSPAHHLCMQLTATAPSSAPRTPTPVPPALSPVACPQRLPKALRCIQTLCCGCPHPPVSPRLVNAVATRTWLWRGCGTGTSGTRDWLRGPSAGLCSLPWARHTHPSSMPAAMRWARRCTGPPARRHSHTRGVSRRPLSLADTTRTSCIPRS

SEQ ID NO: 770 - protein, 280 aa, Homo sapiens
LAPAAATVLRPCWWTGPLVGELAPRLPLWLPLPLAPQSARAVRCCMSAPNQPLPSPPAQQAPQTLPGPPGLAQLPLPPEVPPGSHLCVETSSWTIPWTGACPAVAVEQAGGSCRLQLRSQDPSPAGMGSSPCSPAHHLCMQLTATAPSSAPRTPTPVPPALSPVACPQRLPKALRCIQTLCCGCPHPPVSPRLVNAVATRTWLWRGCGTGTSGTRDWLRGPSAGLCSLPWARHTHPSSMPAAMRWARRCTGPPARRHSHTRGVSRRPLSLAGMGGAFTDG

SEQ ID NO: 771 - protein, 209 aa, Homo sapiens
ASSHMRAGRAVEGMTAACPAHPQRPVTWTSAPAAGSPHGQSNPRRQPARHRRGLDQQLPRPPGKPWWVPQGHPPSRCVRGSCRRLAARAPRTAASPLAATPLTPAASRPTRAAAWTCGGPQMNWAHCSACQQRGPPSPACAPACPGQSSTRCPPPCGPTMTHHAAFAWLLETTAPPHRAAPATVRPGTQAARRPPGVPLAGWARDGGAW

SEQ ID NO: 772 - protein, 144 aa, Homo sapiens
WWVPQGHPPSRCVRGSCRRLAARAPRTAASPLAATPLTPAASRPTRAAAWTCGGPQMNWAHCSACQQRGPPSPACAPACPGQSSTRCPPPCGPTMTHHAAFAWLLETTAPPHRAAPATVRPGTQAARRPPGVPLAGWARDGGAW

SEQ ID NO: 773 - protein, 59 aa, Homo sapiens
PPWVEPPRRPTTPSPPTRPTCPSTAPDSSPPAACWAAPPPASDASPGPRPGPAQKAGSV

SEQ ID NO: 774 - protein, 58 aa, Homo sapiens
PPWVEPPRRPTTPSPPTRPTCPSTAPDSSPPAACWAAPPPASDASPGPRPGPAQAGSV

SEQ ID NO: 775 - protein, 184 aa, Homo sapiens
PTRSEVVSCHPTTRSVPRRLCLPSQLPWLMAEETARWTEPWRGQRTRLPQAAPGLFSSKLSLWGHLCRGREPEAKMRRERGLLSCSQGNAGPRVPVAGVPLTISRKTTYFRKRRRCPQATWCLRGGPEAPSTRAAPPSLRAARAHQRTGRQHPPPAKHSSSQCTQGRRWGAWHPGSWPVAQRMG

SEQ ID NO: 776 - protein, 47 aa, Homo sapiens
PGGTTSRGLYHSRTVCHSTARFDQAAPVGNATVSFSHDAWQHRIQWH

SEQ ID NO: 777 - protein, 86 aa, Homo sapiens
VCQTDLRGHVGVPPEGRDHPVPAQAVQLSGHLCRWSGLYHSRTVCHSTARFDQAAPVGNATVSFSHDAWQHRIQCRFGCICSDYFS

SEQ ID NO: 778 - protein, 328 aa, Homo sapiens
CQMPARTAGPATTPTVATTACVSTAGLVRTAARTLMTVPAPPASTAPPAMTVWPPSTASVPMAAQVCCATSTTHASATPVTRAPTATPTLSMARPSAPAPRGTRARPAARTWMSARWVPTPASMRASASTRWAPSSASVCRATRAPDARSTSTSASRTRARTTPPAWTRLGSSSASACPATRVCTARSTQTSVPAAPACTMAAAWTRSMSSSASAPRASLGICASTMWTSVPAPPARMVPSAWTDPTLTPVCARKGTRGRTARWTSMSATPTPATTAPARTASPPSPASAAQATRATTARPTSTSAPASPAATGAPARTATTPTSASA

SEQ ID NO: 779 - protein, 72 aa, Homo sapiens
HHAEYRGSLLQHRQICPNAGHVCGMWQLWPGGRGPPPCLFAVLSVLSPLLCQQQDHQGDAAQGLALCGVYCV

SEQ ID NO: 780 - protein, 185 aa, Homo sapiens
CYRRAKWKGFPSSPLSHQKTWCPMTRIYTNAKRTSITPISAVMGRAIATITGTSTPTTCTASSRASPRTTSRSSRACSPRSCSSSTATWSWSRCTSSIPPWCHPIPVLATRSPTCPGCASSTHPCPQPSPAQMRRRASGRAPHWRCLTARRMAWSPGLGSCLGRQAARRRSACTSSCWTCSAAAT

SEQ ID NO: 781 - protein, 184 aa, Homo sapiens
CYRRAKWKGFPSSPLHQKTWCPMTRIYTNAKRTSITPISAVMGRAIATITGTSTPTTCTASSRASPRTTSRSSRACSPRSCSSSTATWSWSRCTSSIPPWCHPIPVLATRSPTCPGCASSTHPCPQPSPAQMRRRASGRAPHWRCLTARRMAWSPGLGSCLGRQAARRRSACTSSCWTCSAAAT

SEQ ID NO: 782 - protein, 101 aa, Homo sapiens
AARDPWTRTSRRQPGRLCRAGDPPTAPRRHGLSPRWTLCGACCPCWASPSSAASRRASWPRGGNAPLGTHPGGSLNGPSSGRGSGGKWRRQPVLQARRPAR

SEQ ID NO: 783 - protein, 238 aa, Homo sapiens
SQRAHARSASKRLPRLPTSWHCGARTRRSTSSMVAGPSSGTGTTRWQGPPSHTHAGATGRTSRPRVPPRSLSGSSCCSRRATLGCTTSTPSTGRQVATTRSRRPCSPGIMGPGPSAQSPAAEVCRGRMCTAWSGRQGPWTRSTVTPWAGLMTNRGSAASSPALPGGGQVSGSCAPAPAGLGASPAGPCSASAAWGWMSRAPWSHPPVNTFPGPLLKPLATAMYPVRPPGLWGTGLSAQ

SEQ ID NO: 784 - protein, 168 aa, Homo sapiens
EVQWGQKDACGSGALSGLQAPVNAASPAGPATPSAAAPAAAATAAAAAATRASSPTKFVPACAPSAPAGRGGHAQRRPAGRRPHAAQPARAIRVSHPPAGEPEHAPLFRACFQHAASSSAAGAQPAAAAFRRAPLHERGQEAALRLSGQRGSGPLRFVERQHAQRRSG

SEQ ID NO: 785 - protein, 74 aa, Homo sapiens
SPLPFRLPRPTRRVHTACARQLPFGAAPAASGPGPPVPATAAAAAAAAATAAAAAATATATAAAAAAPKRGPHD

SEQ ID NO: 786 - protein, 269 aa, Homo sapiens
RLQSAEGGRAGEAQRRVVAALEEKVLHPHRGRAAAYPAQAAATPAAAAATAAAAAATTARAGAGRAVPTQWPRCRQPRAAGQAQGTALLQHEDRGLCGAQGQVHVLHCGDGRGQGDRLSVPARPGLERRDHAADGAVQESSGHPGGQIHAAEAAAPGPAAAPLAAAAAAAAPAPTPASASAATPAPITTPASAPTQASAPAAPPVSASTSTSTLSSSLAPTPSPAPASAPNTAPTPTAALAAARAPASPQHLQLCLKGAAPGQDKVLRT

SEQ ID NO: 787 - protein, 203 aa, Homo sapiens
IRRGRFSAASTVKTAAGLGWSPSLQFLPQWRRSLCLGKQSRPPPLRNLPPPTLLPLPRVVSGQEPGAATETEPPADGRSRLLQPRKPALCSASPASLLQASLSSPPAPEFAGPPQAAWEPEPGVPEPGLVLWALPSGSWRHQRLHPFCQQLFGETRSRSSRHFQFVGHFTASPGECATLFQHSMHFYRNTLETLWMNQGLFLI

SEQ ID NO: 788 - protein, 295 aa, Homo sapiens
VRSSKARVQPLRRPNPAAALPLTQLPTQQAPLRWALLATAPPAPRTQASPAADKIPHLPLASSHLSPPKEPPTRLGAAPPTLRTLPTPAAPLQPPSSPGGQRTATKMPFPAATSLHLQPPQPPPRPSPPPLQPLPHPPPLPPHCPRPPRHPLPPRPLSFVVLMQTTQRIMKAGIATSAILPTHHAGPHGRNPLEPLLLKIQLSASHLLTPPTCPPSPAGPPTRTTGLLPQRLHPRSLQNLVEAGVEEGPALREKKFGLPPAQPPLPALAPQPRRPPMRVCPSPSTAAWIPASRCC

SEQ ID NO: 789 - protein, 30 aa, Homo sapiens
PGGPASTCSSGKCTAPPAAWPAASRVWTMS

SEQ ID NO: 790 - protein, 182 aa, Homo sapiens
PLRPQQQVLQRQRDPKVGGSRPRPGQFPRAVAPRPKHSPRTGGPAGSPSATGAACCMPALRRAVHTGSGVPQLTTTTGTGPGATVWRPPRLQGAQLPWIPVPPAPASMEAPAPIPRTPSPITAAAPGPSPARTAAQRNALMRPATSTWRGATAGPACARATWNSASASGAGPGAKAPDIQLV

SEQ ID NO: 791 - protein, 307 aa, Homo sapiens
TARSQGASASAGIFSTRTSTPSSRASSSTKVWTTTIAGILTAPSGHGATLRIRRSSESSVTSPAAGPRHSPAKRPQLSAASAGRVRATGAQPIPPLRAYLASVGTRKSRISTDLRQKNTRAKTFGRTSAGTPTAQRRPGASHCGPACARPFATRSGVVQTTCGPRTATTAQGSSTAARSARPARVSSASAGPLRRRTSRSSRLPPNRMHNWRRTSAGTQMGIAMGPGATRWTQGPHSTTVPCDAALMTSRHQSWTPQTRCSLRSVARGWIGWISGVPSCAWLGAIRATHPGQSACGIGRASISAGGL

SEQ ID NO: 792 - protein, 52 aa, Homo sapiens
PLPSPSSVGGHPMDRVLLLVWGGHPEPGSFLCGGGHPGACHFSGRVEMHVHP

SEQ ID NO: 793 - protein, 140 aa, Homo sapiens
RGPQDPTARSTWMTVPAAPATRAPVWTRSMATSVPVSRATQGACVTSTSMSVRATPATTGAPARTASMASPAAAPRATTTPPACLRSMSATATPASTGPAGTASTGTSATVTLGGVGPTVTSTTMSVNPTLVSTAAPAKT

SEQ ID NO: 794 - protein, 65 aa, Homo sapiens
KGGGTGPRGELQQSGVVVGLLGDAPGKHLGYTRQHLGAVGPISIPREHLPACPGRTPTLGSLPFS

SEQ ID NO: 795 - protein, 109 aa, Homo sapiens
EPSRSSRLRTPHAAWHSHPLTCSLRLTITRSRQPASGPHLPATCSLASTCWWLGCQACSLPAWQLSLHTWPSGPTPRSQSMGHWWWRMWWHPASRPWLTTTWLSWPSGP

SEQ ID NO: 796 - protein, 84 aa, Homo sapiens
GRPFGSSSNGTNSREPASSWGVWLSCSYAGPSSACSWKPTDSSASLRAFSLSPSASWAMSATSPSWVRCSGDFKALARWSEKQR

SEQ ID NO: 797 - protein, 132 aa, Homo sapiens
LGPGAPPSRGPPGPNEAPPPSWTPASERTMDLVSPSLNCLMADASPANRHRTLLLGLGDLASFLARTRQWGRRRSSVVHTGSGTSMEEGHRVGHVRTHGTVLVPRPSQVPKPAPKESGKGLAESRDPRGHQE

SEQ ID NO: 798 - protein, 419 aa, Homo sapiens
NPCVLLQLRPLPQHPGHQLYGHALLHSRDDLDPHRADHSSHYDRNHWIHGHPVLHPGNSSPSQSADQHGHHTHSHQFQSHFLLQSKDCNHPSSADKHSHQIHSYQLYTHPLLHPWDHRDPPRTDHHTHGHHVHNPPLLHSGDHPHLHSADHEGHHDKGHQFHVHPLLHSGDDLDPHRADHSSHYNCSHWPHGHPVLHPRDHLDPHRAQHYSHRDGAHRIHGHRLLHPGNCWHPQSADQHGHHTHSHQLQSHSLLQSRDCNRPSSTEKHSHHTHSYQRYSHPLFLPGHRLDPPITDHHTHGHHVHSHTLLYSRDCPHLHSAYHHDHHNQGHRLCGHPLLHPRNSSHYQSADYHNHGLHSHPLLQPRDGTHASSVDQHNHHTHNQRLHGDPLLHPGDHPHRHSADHHHHNCGHWFYGNTLL

SEQ ID NO: 799 - protein, 242 aa, Homo sapiens
RLQPLPQYPSHQLHGHALLNSGDDLDPHKADHNSHYDCVHWIHGHPDLHPENSSPSQSADHHGHHTHSHQLQSHSLLQSRDCNRPSSTEKHSHHTHSYQRYTHPLFLPGHHLDPPITDHHTHGHHVHSHTLLHSRDCPHLHSAYRHGHHNWGHRLCGHPLLHPRNSSHYQSANYHNHGLHSHPLLQPRDGTHASSVDQHNHHTHNQRLHGDPLLHPGDHPHRHSADHHHHNCGHWFYGNTLL

SEQ ID NO: 800 - protein, 232 aa, Homo sapiens
VHWIHGHPVLHPRDHLDPHRAEHYSHRDGAHRIHGHRLLHPGNCWHPTCEHHGHDTHSHQLQSHSLLQSRDCNRPSSTEKHSHHTHSYQLYSHPLLLPGHHLDPPITDHHTHGHHVHSHTLLHSRDCPHLHSAYHHGHHNQGHRLCGHPLFHPRNSSHYQSADYHNHGLHSHPLLQPRDGTHASSVDQHNHHTHNQWLHGDPLLRPGDHPHPHSADHHHHNCGHWFYGNTLL

SEQ ID NO: 801 - protein, 232 aa, Homo sapiens
VHWIHGHPVLHPRDHLDPHRAEHYSHRDGAHRIHGHRLLHPGNCWHPTCEHHGHDTHSHQLQSHSLLQSRDCNRPSSTEKHSHHTHSYQLYSHPLLLPGHHLDPPITDHHTHGHHVHSHTLLHSRDCPHLHSAYHHGHHNRGHRLCGHPLLHPRNSSHYQSADYHNHGLHSHPLLQPRDGTHASSVDQHNHHTHNQRFHGDPLLHPGDHPHPHSADHHHHNCGHWFYGNTLL

SEQ ID NO: 802 - protein, 452 aa, Homo sapiens
NPCVLLQLRPLPQHPGHQLYGHALLHSGDDLDPHRADHNSHYDCIHWIHGHPVLHPGNSSPSQSADQPGHHTHSHQFQSHFLLQSKDCNHPSSADKHSHQIHSYQRYTHPLLHPWDHRDPPRTDHHTRGHHVHNPPLLHSGDHPHLHSADHEGHHDKGHQFHVHPLLHSGDDLDPHRADHSSHYNCSHWPHGHPVLHPRDHLDPHRADHNSHYDCVHWIHGHPVLHPRDHLDPHRAEHYSHRDGAHRIHGHRLLHPGNCWHPTCEHHGHDTHSHQLQSHSLLQSRDCNCPSSTEKHSHHTHSYQLYSHPLLLPGHHLDPPITDHHTHGHHVHSHTLLHSRDCPHLHSAYRHGHHNRGHRLCGHPLLHPRNSSHYQSADYHNHGLHSHPLLQPRDGTHASSVDQHNHHTHNHHTHNQWLHGDPLLHPGDHPHRQSADHHHHNCGHWFYGNTLL

SEQ ID NO: 803 - protein, 25 aa, Homo sapiens
SERGAPCQRGADSPLSTSATWTSAS

SEQ ID NO: 804 - protein, 33 aa, Homo sapiens
APKAILEAPEERAPPGSQQGNAENSYEPPKGCK

SEQ ID NO: 805 - protein, 631 aa, Homo sapiens
HHTVDLEAPRLRLLLPKGTLLRLPLHVKSPEPPLPIESPKGTPPGPHPPNRKSPGPHPPNRKPPGPHPPKRTPLGPHPPKRTPPGPHLHSGTPPELPLPHEAPNWITPEPLLPSRTTPKLLFLLVLPSGKTPGHPVSSRTIPEPPLPTEPLNERIPEHPVPSGTIPKPPEPPLPIEPHETTPEHPAPSGTIPEPPLPVELHETTPQHPVPSGTIPEPPEPPLPIEPHETTPEHPVPSGTIPEPPLPVELHETTPQHPVPSGTIPEPPEPPLPIEPHETTPEHPAPSGTIPEPPLPIELHETTPQHPVPSGTIPEPPEPPLPIEPHETTPEHPVPSGTIPEPPLPIELHETTPQHPVPSGTIPEPPEPPLPIEPHEITPEHPVPSGTIPEPPLPTEPPNKTAPEHPVPDGTIPEPPLLTEPSNKRTPEHPVPYGTIPEPPLPAEPSNKRTPEHPVPNGTIPEPPLLTEPPNKRTPEHPVPDGTIPEPPLATEPSSETTPEHPVPSGTIPEPPLLTEPSNKRTSEHPVPDRTIPGPPLPIEPHETTPEHPVPSGTISEPPLPSEPPNRTTPELVFNRTSPDHLLPNKTTLKPLVPNEITSDPLVHSGTAHSPFPFNETTLEPPHLNAAPKRRI

SEQ ID NO: 806 - protein, 80 aa, Homo sapiens
CLPTHQEVAVEADCRDTGTPPSCPPAPTQRRVWKCTPWSVGGGTTAQTAPPSTRMMATCPCPQGWPQCPVAERAVETICP

SEQ ID NO: 807 - protein, 133 aa, Homo sapiens
RTWWHLFPTCRGTGKTTTWMGTRAPAGAGSQAAAAGRTVGWERKARTRSCPGQTRSRRMNLRTQILMGKRRHHNPHPRPATPLPTFRAPRHPSCPSPLLCLCPQRPRAPQHLMKRTKKITTPSAFCPPDHSPF

SEQ ID NO: 808 - protein, 121 aa, Homo sapiens
RTPSTTAATTRTRAGWPAPRAFSTPCTVWLPGRPLRTQAPSPRSPRPTSHRTMTRRPRAAGGTPARSESGECFSPRRRPTSWSGAFGSSGTCRRPSANTWPASSASRPRRSRSGSRTTATR

SEQ ID NO: 809 - protein, 128 aa, Homo sapiens
ATPTCPAITRRPLDFLTPSMRLRGLLQGTLRFHTSPPTDSSVTETIILCTMLFLGSLGAWGTTSISTGSIFSLKTLRSQHGGQVGLKVSRPRAPRMGAATPTPRAPWVARWLMGSQAFTATPSARPPG

SEQ ID NO: 810 - protein, 85 aa, Homo sapiens
SMSGFISSQFPGSGVMYSNGSTLSILLLCPLGHCMVHGHICYFSTMATNNPKKSKRKLFLAFWLTVETRLFAVIHMFFGIFSGCI

SEQ ID NO: 811 - protein, 23 aa, Homo sapiens
PPRKKKKRTLESAGLFPWLHTQC

SEQ ID NO: 812 - protein, 211 aa, Homo sapiens
CRDQPRCHRHLVSSREAMVPIPLEHPRRWNRPLATPAPSRQPLCCCHDAVSTLTAAGLPREWPQPAPFLDSRRPSLCTVWCHRKDMRPVCRPLHQAHCCLGRSKLRMVWAPCPQLMAVRLGLTPIRTPPPVPWPRYPAVSLLGRTWAWWLNLKLMPPSESHHSASWPCPAGLTWSWTSPNHCLTVLPWLHSLLSPKAGPLARQKSLASRWA

SEQ ID NO: 813 - protein, 63 aa, Homo sapiens
PRGAPIAPSPWAAAHAQWGWLGGRCSGETGAPGRGQPLVLVGGAGQGPALCHQAHQHCWGLLR

SEQ ID NO: 814 - protein, 40 aa, Homo sapiens
RTPPISRCYQAGSTGRRPAGSYLSPVLPQGTPFLSSLGER

SEQ ID NO: 815 - protein, 54 aa, Homo sapiens
KKTRTSLHQATRKHIIIPLERRSPQAHKLWMIVIIKDIFLMKRFLTLASAHVGV

SEQ ID NO: 816 - protein, 170 aa, Homo sapiens
TPAEWAAWTLGPGTVSWRRMTEGTVAFPAVPRSELVSPELPAVAPWAGLGAIPVSCALWPTPLSTEPCARVVRASSLTASLSFWKTSTSAKSCQGCVRGVTASTRLAVSSVSAHLATTSVSTPASVRILTNAPHTPASVALAPATTPWGTTPVSALQSTSKSMVATTAWI

SEQ ID NO: 817 - protein, 424 aa, Homo sapiens
VFKETFLANITPTQVSLPAMVSKTPTPISLQAAANVGLGQGSLPTMANTALAPDSLPAMTHMGLAQASLLALVNTSLAQGSPLVTVSMDLAQVTPLATDNTALGQDSHLGVNDTDLAQVRLPAMVSMGLVPVSLWATADKGLDLASLLATSDMGPVRGTPPATANTGLAQVTLTAVAIMSLAQARLLALGNMSLAQDSPLAIVSMVLAQVTPLARDNMDLRQGRHQALANMAPAHVSLPAMVSMSLPPVTLQAAANTALDLASLQATASVGLGQGSLPAPANMGLALVDLPAVAHMCLVQATLLALVTTSLAQSIPLVTLSMDLAQVTPPATDNTALGQDSHLGVNDKDLVQVHLPAMVSMGLAPVNLWDTADMGLDLASLLALAVADMSLVPGSLPAMAHMGMAQGGLQAVAHMSLAPVTLLA

SEQ ID NO: 818 - protein, 358 aa, Homo sapiens
ASLLALVTTSLAQGSPLVTVSMGLAQVTPLATDNTALDQDSHLGVNDTDLAHVRLPAMVSMGLAPVSLRATADKGLDLASPLAAADMGPVWGTPPATANMGLAQVVLPAVAHMSLARVTLLSLVNMSLAQDIPLLTVSMVVAQGTSVAKDSMVLHQDSHQPLTRRDLAQVSLPATVSMALAQVSLLAMANRALDLASLLVAADMGPVPGTLPATANMGLAPVGLPAVADMGLAQVSLLDLVTMSLAHGSPLVTLSMDLAQVTPPATNNTALGQDSHLGVNNTDLAQVHLPAMVSMGLAPVSLWATANMGLDLASLLALAVADMGLVLGSLPATAHMGLAQGGLPAVAHMSLAPVTLLA

SEQ ID NO: 819 - protein, 358 aa, Homo sapiens
ASLLALVTTSLAQGSPLVTVSMGLAQVTPLATDNTALDQDSHLGVNDTDLAQVRLPAMVSMGLAPVSLRATADKGLDLAIPLAAADMGPVRGTPPATANMGLAQVVLPAVAHMSLARVTLLSLVNMSLAQDIPLLTVSMVVAQGTSVAKDSMVLHQDSHQPLTRRDLAQVSLPATVSMALAQVSLLAMANRALDLASLLVAADMGPVPGTLPATANMGLAPVGLPAVADMGLAQVSLLDLVTTSLAHGSPLVTLSMDLAQVTPPATNNTALGQDSHLGVNDTDLAQVHLPAMVSMGLAPVSLWATANMGLDLASLLALAVADMGLVLGSLPATAHMGLAQGGLPAVAHMSLAPVTLLA

SEQ ID NO: 820 - protein, 358 aa, Homo sapiens
ASLLALVTTSLAQGSPLVTVSMGLAQVTPLATDNTALDQDSHLGVNDTDLAQVRLPTMVSMGLAPVSLRATADKGLDLAIPLAAADMGPVWGTPPATANMGLAQVVLPAVAHMSLARVTLLSLVNMSLAQDIPLLTVSMVVAQGTSVAKDSMVLHQDSHQPLTRRDLAQASLPAMATVALAPVSLLAMADMGLDLASLLVAADMGPVLGTLPATANMGLAPVGLPAVADMGLAQVSLLDLVTTSLAHGSPLVALSMDLAQVTPPATNNTALGQDSHLGVNDTDLAQVHLPAMVSMGLAPVSLWATANMGLDLASLLALAVADMGLVLGSLPATAHMGLAQGGLPAVAHMSLAPVTLLA

SEQ ID NO: 821 - protein, 465 aa, Homo sapiens
VTKSLAQDSPLATVNTDLARVIPLPMGNMVLHQDSHRAVANMELPQVSLPATVSMALAQVSLLAMANRALDLASLLVAADMGPILGTLPATANMGLAPVGLQAMAHMGLSQASLPALVTSLAQGSPLVTVSMDLAQVTPPATENTALGQDSHLGVNNTDLAQVCLPAMVSMGRAPINLRATADKGLDLATLLAVSDMGPVQGTPPATANTGLAQVVLPAVAIMSLAQARLLVLGNTSLAQDRAIVSMVLPQVTSLARDDMDLRQGSHQAPANMTLAQVNLPAMVSMSLPPITLRAAADMALDLASLQATASVGLGQGSLPAMADMGLAPVGLPAVADMGLAQASLLALVTSLAQGSPLVTLSMDLAQVTPPATNNTALGQDSHLGANNMDLAQVRLPAMVSMGLAPVSLWATANMGLDLASLLALAVADMGLVPGSLPAMAHIGLAQGGLQAVAHMSLAPVTLLA

SEQ ID NO: 822 - protein, 52 aa, Homo sapiens
SHCSRYVSFSCKISKEKRFNYACKFYCKCRDTSNLSLPDPEAIEIYLSFTVL

SEQ ID NO: 823 - protein, 84 aa, Homo sapiens
VWPASISPTVASVLWNREVVSPHLGLRGPGVPPAPHQMLPAILCTPETGPPQIQGDRGPWGSPQGQPLQASCTHLTLICTVLHK

SEQ ID NO: 824 - protein, 25 aa, Homo sapiens
QPSDFKKNSRICDLSAIPKQWNYQP

SEQ ID NO: 825 - protein, 60 aa, Homo sapiens
RVPTSPPSLPEAPASTVLPSCSSSRTSRLTSLRTHAPHPAISWPSGPSALLISTRNTKKP

SEQ ID NO: 826 - protein, 165 aa, Homo sapiens
YRATTSQTRTCPPVWAGSAWGWNHAYGGSASSTAPRSPGQKPTAAALKSSAAAAATGTPHAAAAAAESGSTPDPTLPGAWDPDLSPPGPPGLPTSTWGLPWTTDRPPPGARGRASTSGPTPAPCPTRSLIYRTSPWPCPSHTSTIQPSRAKETFTITFPQLPASH

SEQ ID NO: 827 - protein, 27 aa, Homo sapiens
KKCTVLIHVRLSGWIFAKKINSRCGSQ

SEQ ID NO: 828 - protein, 45 aa, Homo sapiens
RYNSVIYRCFIFKKSSRKDGCYWCRSNRCRIGFSLAKTWCRCDSS

SEQ ID NO: 829 - protein, 61 aa, Homo sapiens
KRPMNTGSIKVEERKKEKSYVSIIIWRKPKNQKLAAKWKQRIVTLKMLGNIYWNQFQKSSI

SEQ ID NO: 830 - protein, 125 aa, Homo sapiens
VRTSFRPSHLTLSSRTTAARLVASPHRSPLPWPPAPQRATPTGSTAPSNAQSWTCKSFPALPPILELRPWGETQSKALETGWSSMCPLKFPALNSNEVSWAPGSLAQLFSLDSVPIPQQQQGPEM

SEQ ID NO: 831 - protein, 207 aa, Homo sapiens
PLLSPPSLHVLCALGTGMPLEPLRPLAICSTTPSPSSQSPAPLRVNRPTTSLPIYHLLCALDTEMPPGRPRPPATPNLTPSPSSQTHQMPSISVSPPNTSPFSSLHLCVLGTEMHPGPPPHHARPQSLPSYSRTSPGPAQRALSLPWTLCTSAPTSPPLCALGTGMHPPSHPHHARLLSHPSSSRIPLELVWRAWPPPLTLCMAPQC

SEQ ID NO: 832 - protein, 166 aa, Homo sapiens
REESARRQKGEQRSIRRQQPMSVRPVSMVPGTAMSHLLPLAPREGKVSGACLVHQAPRERREHGAMTVFESPRMPHFSVQKARRERRGSQELWDPQDSQAQQARRARKARRATEASRACRESQAGTAGQERSVSLGPKGRRETLALLGLRGWQESLGPPASLDPLG

SEQ ID NO: 833 - protein, 160 aa, Homo sapiens
GSILSMGLPSGLACPGTSPSTCARALTPVASAAFPDPLASPSPAQKASAPPQTRRCHPSQRPRVARSLGVVPGPDGPSCCPTSAQHGLGAPWSAFWARSCPHSQPLSPLLPYPHPCPLPWLARATVPPLTAPPGALLPGSPLSFSFPHWEPLDLRTSVPG

SEQ ID NO: 834 - protein, 54 aa, Homo sapiens
WTLPIPGLAIALKQTFSLSGLLFFLALLTTTSPQSISITVTPGSGSTPSIMSGC

SEQ ID NO: 835 - protein, 176 aa, Homo sapiens
TRSWCGAPLSAARWRSRTPRCTTPRSPSAWARSGSCWTRTRSGPSWRRPSGSAPDTCATTPTTSTGLGARPRARAPDLPAADREEATWPAAARSGGRGTRPPNRAEALGTDPPATRQPTCLAAMALPTANWKPPHRAPSLRVTLGSRGNCCPPIPTTCPLALPLHTTLPLLVPPCP

SEQ ID NO: 836 - protein, 49 aa, Homo sapiens
KMRRKSPRVDLKKPPMLWTCMSVFYVAVAMMKTGYCCVMAVMTVTIPFA

SEQ ID NO: 837 - protein, 85 aa, Homo sapiens
WLMEGWSQPYTQPLLQRSRILKPKKKHRRKKKLMNRKRMPQHFIEAGLHWIKTLLIRGSVSLLANSVCLWFSSYNSFLETLLLRL

SEQ ID NO: 838 - protein, 17 aa, Homo sapiens
TGGQVLAPLVFLALSLS

SEQ ID NO: 839 - protein, 102 aa, Homo sapiens
PSLPHTHPKGLPPARLLKSPGSISRVCPKPRSPSRPCRRRKSSGTGRNLSSSRRRPPTTRTPLPPTRAPPCTRASCAPRASSGTTCSWTPPTSCPLTRPHPC

SEQ ID NO: 840 - protein, 176 aa, Homo sapiens
GPPPTSNRRKERRSCRLSPSHHCRLRLRLRRHHSSLPRQKASRLWSCPCLSLSSFSRPSPALRGSPTAPLPPPPPETSQPARCRTTRCLCSKSPGSISRVCPKPRSPSRPCRRRKSSGTGRNLSSSRRRPPTTRTPLPPTRAPPCTRASCAPRASSGTTCSWTPPTSCPLTRPHPC

SEQ ID NO: 841 - protein, 56 aa, Homo sapiens
TLGNAAGASSRMKPSCGSAPSRRPSSKAGSTKKGGAPPRCPGEIGRSAGLSSASPS

SEQ ID NO: 842 - protein, 440 aa, Homo sapiens
PQGQPASLPVLRQMPAASAQVTPLPGLPHRAPRGPQVPQAPTSLHQVVPCLPATRQRHLPTSPALLGATHPRVPLIPPLHPPTPLPLHPILQPVPTIVPHHPAIRQRHPATHRPLPATHPPLPATRPPLPATRPPLPATHPLPLATRPLPLATRQRLPATRRHLPATRQLHPAILPLLPATHLPLQAIHPPPPATHPLPQVTHPPARTILQPVPITPQHHPATARHHPAIHLLVPTTHLPALTTAQPLQATLQHHPAIPRPHQVTPLPAHDTHHSLQPIPQAHPATAPARPATAQPHPSTPQPVLLTVPAPQSIPQPLPSTHLPVPNIHPPLPSTRLPVPPIHPPPQNTPQHLLLIPQPLQSTPQPLPSTHLLAPLTRPLPPSTRPPAPPTRPPPPKAQPTLPLPLVTRPPAPPTVSQARLSARMTVTRRTEGTWGAAAG

SEQ ID NO: 843 - protein, 57 aa, Homo sapiens
VGWGFLGVLRAPPHQDGVAVARPVTARPAPRGAVGTCLGFVQLCHPMNLEDQEAQGA

SEQ ID NO: 844 - protein, 25 aa, Homo sapiens
SNTAWEDFFWCTAVVAPTYFLHFTH

SEQ ID NO: 845 - protein, 69 aa, Homo sapiens
SFVFLCSSWDAPPQLWPKSTPLAHQVLYIRSLLPAAGTARAQILSSTRSVETMESSTSPLAMPAAATST

SEQ ID NO: 846 - protein, 63 aa, Homo sapiens
GRPRNAKEDVHSPGQPRYWGTVDVQSRHFPQTETHQQHFRQTWIYYIELHAQIPAPVPHCKSQ

SEQ ID NO: 847 - protein, 23 aa, Homo sapiens
FWYSDYIELHAQIPAPVPHCKSQ

SEQ ID NO: 848 - protein, 182 aa, Homo sapiens
TLQIIRVEEVQPAVSTIKTVQGGVLAKIRMRIAVLDLVVIQEGSLASSVIVEVDQGEGLMIVDGVITMALAAVVTEVALANLNVVETVAGVTNQMKMIGQNHSHQVNAWNRNSFLEATLGLILRNTMTFQLRQQATTVLHILKVSVMLRWEKLSWETLSLLVILAQLQCKSMLFLLSKRKET

SEQ ID NO: 849 - protein, 176 aa, Homo sapiens
GTEKLLKVSTIKTVQGGVLAKIRMRIAVLDLVVIQEGSLASSVIVEVDQGEGLMIVDGVITMALAAVVTEVALANLNVVETVAGVTNQMKMIGQNHSHQVNAWNRNSFLEATLGLILRNTMTFQLRQQATTVLHILKVSVMLRWEKLSWETLSLLVILAQLQCKSMLFLLSKRKET

SEQ ID NO: 850 - protein, 109 aa, Homo sapiens
TSTTPAPCTPPSLRGSGPSWGSPTVWRRCVPTSRCWSGSWQTLGGWPSQVPATQRCRMSSRSRCPCYAATCPDGGSAGPRHPLPPCPPAPPHPAQLSPLTTSTPCWGIS

SEQ ID NO: 851 - protein, 108 aa, Homo sapiens
RFSYCGALLKRPCPCTATPSPPVWRPTTPFRLWAPGGGQAGGAPEKWWAGSPLLCHLHPPCHLLLWKMTGVAQPQSHLPRCSAVPPQMTSVRRRPRIATHWAAAWTVV

SEQ ID NO: 852 - protein, 30 aa, Homo sapiens
SKKQTGVILALMTWFWKINVARRLSTSRSG

SEQ ID NO: 853 - protein, 69 aa, Homo sapiens
QRLWHVQGRLCGRRCPPGCLPFHRGAPQAAGHDGGHASERVLCGQGGPEQERHPDPEVPHGTRHHHQLG

SEQ ID NO: 854 - protein, 69 aa, Homo sapiens
QRLWHVQGRLCGRRCPPGCLPFHRGAPQAAGHDGGHASERVLCGQGGPEQKRHPDPEVPHGTRHHHQLG

SEQ ID NO: 855 - protein, 35 aa, Homo sapiens
CLWSTTTANPPSASNTCRQWSMHKCPITSPHREIG

SEQ ID NO: 856 - protein, 266 aa, Homo sapiens
PAAYSPATAPVQAPPPLRDRMSLWPRPRNQLQVQLPPGDRMSPRSQSPGQPWAPPPRQPTMSPQPRTTSQPRAPPPPQPTVSPRPRTPGRPRAPPPPQPMVSPRPRTTGPPWAPPPLQSTMSPRPQALHQAQLLLWCTTAPLPGLPQPQPARALHSQFPATTLILLPPLPAIAPRLMPVALTIARYLLSPPPITALLPSCLLGSLSFSCLFTFQTSSLIPLWKIPAPTTTKSCRETFLKCFCRFINKGVFWASPILSSGQDLWWYN

SEQ ID NO: 857 - protein, 81 aa, Homo sapiens
GTGAAEGAHSEPRGRGGRGRGAVGRGSPGRPAAGPTAGVQARGAPAAQEASTGQGPGHRPGCSVRTPPEASWDCRWHSPRP

SEQ ID NO: 858 - protein, 29 aa, Homo sapiens
LSVTCTGSSHSMRCLCPGGATASRTYSVC

SEQ ID NO: 859 - protein, 160 aa, Homo sapiens
ILFIVLDLLGFPMQMPKELVIQLVFPWAMQQQLLPILLTCILERILPSKQVTLLAHLTKCPVPPPAGLCHRTPPPRTPTRLPCTLCEVPTPSRARMHSKARTTHSRCMQHLLTSSTTPRWCSPTACLQRCTLLPSPLLEATGSPWAWWLGPPWPCQQVPC

SEQ ID NO: 860 - protein, 89 aa, Homo sapiens
LVMKNSQILRMKEKEVEEMWLIIRKEQRKLELKKIRKKQRTKKQTLRKKINPRTTVVKKQIPKEPNQNSSATPEFDSLTNFRKSLKRKY

SEQ ID NO: 861 - protein, 161 aa, Homo sapiens
PAMQSTPRGSGRSLRGPHCPPRGAARTFARSPWTSWWSPRLTSRCLLPTCCLTRRCVRSCSRASPWATLPPGSSSACFPNSSPPRTSGCSTTIPGLATRSNWTPRGCGSSATTWKPSTRWRRWRRCGTTNVSPASMRGAAAPTGKNATSSRKQRKWRSEGP

SEQ ID NO: 862 - protein, 125 aa, Homo sapiens
ASVWSCLSRNTLSYAQKTSEMRMFLSVNHGILPKPNLLRKLNCGPCPSAQSGLSLGMCLCLWFAWPLYLQMQIKVMMRRIQTTQRTVELKTILTWKRKKKMSLWKCPMVNQVATTLSSSITMTCG

SEQ ID NO: 863 - protein, 65 aa, Homo sapiens
ILCPCFLRSLALVPQHPAVQDHHPLGEMKATPESSPILYLHIDPLVWAVNLPISSLLMEWRDHLP

SEQ ID NO: 864 - protein, 46 aa, Homo sapiens
KKTTYAVNVGKRLSRSLSSLIMREFIQEKNLMDVLCVQKCSPESPG

SEQ ID NO: 865 - protein, 129 aa, Homo sapiens
ITRRVYPARTCCLDPARAMTACRRGHMGASQTAPRHPSPPALPPLPPPILTRWNCFPQSCPPASPLKRDPQQGQFIPSQPPTLPWTLRKQPQGPSCSRGSQRAVRGTSPSQGILGSTGCSLGSRLHSWC

SEQ ID NO: 866 - protein, 101 aa, Homo sapiens
SAAKRRTVKSSSSSHKPRPWSGVPTDPSAGSCPVTPRNPPRKAPGGLQIQEKSTMESGESTSTGSRQSRSPSLQENEPTATRKVPWKRKQRAVSVTLFLWF

SEQ ID NO: 867 - protein, 64 aa, Homo sapiens
FWPHPPSAAWRSCIALWCASSVTERTRCAGRWLWYCWPTWLRGTAWQLVPLQCRRAVSATSWAS

SEQ ID NO: 868 - protein, 44 aa, Homo sapiens
VPPCFGVCCCFTCPPQVSITSCPVTWMDLFSKTSPSESWDPSKP

SEQ ID NO: 869 - protein, 23 aa, Homo sapiens
FFYIFLYYSSCCIQLPLLTRFFR

SEQ ID NO: 870 - protein, 153 aa, Homo sapiens
MGREKLPSPGVGPRRTVLQMLAWPALPAAPVSATPPGLAWSSDGCLWGAMRRSPGSPVGPPRCGPLAPAPTLQASVTLPLSSHPTAPLLSANSCHSSSLPNQLVSGRMPPFSGTPHSQILICFLKMESKQGTVLMKLLRILLQQLWRGGKRRG

SEQ ID NO: 871 - protein, 39 aa, Homo sapiens
VGRRQAAWHLTCSAAGDSRGRPCGPVTVLYPCASLRGAG

SEQ ID NO: 872 - protein, 55 aa, Homo sapiens
PTGPTSPHSPAARGTGQPAPRCCPHHFHWQPHYPRRLVYLCGRVPEAAGGLGAWP

SEQ ID NO: 873 - protein, 43 aa, Homo sapiens
KNVLLLWIRGTEISLCGWRSTGPLWKKPWGFLQIPTNRVKVSS

SEQ ID NO: 874 - protein, 177 aa, Homo sapiens
AKEPEKGISPCPGGGEANPKHPAGHRTISGGCGSEYSHRGLYHRLQLLCAHPEHHRSGAAQAQRLSGPPQAQQCTGGRAAPRSRQQHHDAHLRPEARCDVRGHRRHGHPEAGGAGGRGAPAHAFRALQADRHRSPPRRPHVWPTWLWEDHVGKGGGTSHNSCIHPGRGLGVCTEVSG

SEQ ID NO: 875 - protein, 175 aa, Homo sapiens
GPGGPVQPLQGGGEANPKHPAGHRTISGGCGSEYSHRGLYHRLQLLCAHPEHHRSGAAQAQRLSGPPQAQQCTGGRAAPRSRQQHHDAHLRPEARCDVRGHRRHGHPEAGGAGGRGAPAHAFRALQADRHRSPPRRPHVWPTWLWEDHVGKGGGTSHNSCIHPGRGLGVCTEVSG

SEQ ID NO: 876 - protein, 63 aa, Homo sapiens
RGPPPVGGTTCTSSTMPSPTASAKTQTSTCIPSSLPWGRSSLWSLGNRRKNICRTTTSTNTSS

SEQ ID NO: 877 - protein, 22 aa, Homo sapiens
YSHHLSEKQKKMCKCHHQRFAP

SEQ ID NO: 878 - protein, 50 aa, Homo sapiens
APTRSTRSGCRPSTPSARGPPASPWSPAQASRPRPARRGTCKPGCSARPP

SEQ ID NO: 879 - protein, 104 aa, Homo sapiens
RDLYFYTMLNPKWFWYKALKNNGCIYLLPSVLQRKGGHWMLIHPNQESFAISKGSNMFHSGGFFHPVPQLRELRKKRKSLILCKTNLLVFINDSRRHLDSMEKF

SEQ ID NO: 880 - protein, 35 aa, Homo sapiens
CGGLPARCLPWPRWTRTTQSLLCTNHGCWTSRYHR

SEQ ID NO: 881 - protein, 282 aa, Homo sapiens
LGLQGTEHPSLRKRGFLNPVGPCALPGQLSPSQMWQSSLGHWARKCPRATHASRLLLGATPWNSVLDFWVELNPSSATAGAVTSPPSLSWGCCMRGRNVPSLASKCLTRHPTATQQTWPLQAPGTPAPTSLTGGQQRGQGCMPWASLTSAWCCPVRARALLILTAGCPATSTLACGAQQCTCAIRWAWRRPTRWCTRQSCWAATRRRTMRRSRCPSQCPSSACPWGPLSSAGLPRPSTPCPSSPPLCSRVQLVIRCMVPPCSSTRRSQGPGYQSDRHGHWAC

SEQ ID NO: 882 - protein, 22 aa, Homo sapiens
VFDGGGCPGHLQEECAESHRAG

SEQ ID NO: 883 - protein, 208 aa, Homo sapiens
SARRRRPSDLPHRSWPPSHRSGRPCHPHLHCGRPRRLGCRPRRCRRRRRCLRPHLLRRYPRRRPLARRCPSLCCRPRCLPHCLPRRLCTALPSSGRPPKVSPRCHTRFQRQWNSRRCSRHRRWPGRPRRPPLTSGSPCLPRRPRGRLPPWSSWSSPFREPRPPKKPCKSSYPPSRPRHRVRKRRCPHCRSSLPGRHRLQSCRPSPDPR

SEQ ID NO: 884 - protein, 334 aa, Homo sapiens
SASQAAVATAACGRAPGHSAKRPRPSTGSQKSSSSRRPRSRAANRPQWTPGCSARAPAWAPANSPSRRVPRSCGLGAGSGGSPAAAASTRQASPWASCPSRTRPHSITRAPASRCTGLRASRTWASIMTITATATTTTTGSHSTATRSRNPTWRASAPTARPGHPTATTTTGTRPRIPTTTTTPTITVAPLIRGTPTATATTITNPHMRPRRGTRLLTATTMGTRARRTLMATTWIPMRRTTRHTHPMTSHTTLPTMYPTLIPTESTTPSPMPKASMAVGTRPSTPPRCPIFTRRSRLRPLCTPGYHRPSRRPTTRMPTPWMTSPSWRNQRTRA

SEQ ID NO: 885 - protein, 90 aa, Homo sapiens
QEHHDQGPWEALRLQVRLPRDRPGPPAPPPGVISVQVPLRPPVHGLLSRPPTEDELCGAPPSSPPRDIFQFFCCPKPILEFTNWGYIPQH

SEQ ID NO: 886 - protein, 87 aa, Homo sapiens
YLQQALHPEELPQRAHAPPPGREVLRVLHLQKEVLSQDPPGATRGPAQCQQWDPPCRHTPRCPRWPPRRGGLHGGDHLRLLRLPSKV

SEQ ID NO: 887 - protein, 72 aa, Homo sapiens
ACPPYDPSPISRLPSGAGFSHPDGAPSSSVFATPSAFPGSPKLPSFPVLSSCPTTVRSLPVESHREGSGGLR

SEQ ID NO: 888 - protein, 28 aa, Homo sapiens
FCFFLGRKGHHGFCQQSLGCSAFLCIPR

SEQ ID NO: 889 - protein, 55 aa, Homo sapiens
VLPVILKMTQVMSGLLSPSRHPLWIQPTIRGKKDSPLKRWWKRSCQRKPWLLESP

SEQ ID NO: 890 - protein, 92 aa, Homo sapiens
SGKAETWTSSSQLLKYFGPCFPWAASASSHTAASTRRPIGATSWGSARTCRSPPTCSPQSLLSSWRSTQPHVPPSTLWGVRMTSLSASTSLW

SEQ ID NO: 891 - protein, 74 aa, Homo sapiens
AIRIPRVLWAFIATKIQWRVQCVSQIAEITSVTKKVRRAVLRGQRIKGVLWKAKVIKNYCSYLPVLLMTGVIPP

SEQ ID NO: 892 - protein, 79 aa, Homo sapiens
GCRPRPPTGASLIAWSRFTAMSPPTVWLLLTSSKSGYKTRQSQGPSQGAPHPGTRGPCTVQPPSSGRRGPGGCSEEPGP

SEQ ID NO: 893 - protein, 65 aa, Homo sapiens
RAAPGGSCRPTVWLLLTSSKSGYKTRQSQGPSQGAPHPGTRGPCTVQPPSSGRRGPGGCSEEPGP

SEQ ID NO: 894 - protein, 65 aa, Homo sapiens
WSRFTAMSPPTVWLLLTSSKSGYKTRQSQGPSQGAPHPGTRGPCTVQPPSSGRRGPGGCSEEPGP

SEQ ID NO: 895 - protein, 71 aa, Homo sapiens
QMLLNPPLRLCSKNPVPPPIMMQRISSLFLVKMQPPNEPSEIALIITRTLPRSLHCQKEDFFLKRKLLRMI

SEQ ID NO: 896 - protein, 27 aa, Homo sapiens
PIFIQTLLLWDFLQKDLKAYTGTILMM

SEQ ID NO: 897 - protein, 212 aa, Homo sapiens
TAPTSQDPPAFLVCLGARVPPGFLASRDPQALREERGPQEGLGRKAAWVKQAPQDIRGAREPPVLLVLVGRAAWQEPPDLLDHQAPLGPLGPQDQDSPLDLMTWKAPGGPSGQQPEALMGHRDLPACRDLRGILACLGCRGRREKLEQMESPGSPASLAERALLGPRGQRETEAAGEKREIQGRTESGSRASLAPPDPRDLWSTCRSRTDPS

SEQ ID NO: 898 - protein, 23 aa, Homo sapiens
KRKKNRKRKTSWDMMMISLWQLK

SEQ ID NO: 899 - protein, 94 aa, Homo sapiens
EIIMEADTNGSILITVETRTGMGTNHLTGGGLCPELIILDSLQVQNLEFSPFLKEQMLGKKIITVRGSITTMKGTDQGACLVTDQGLHLPGLTG

SEQ ID NO: 900 - protein, 29 aa, Homo sapiens
CSRMQRNPPDLPTSPDQTRSGPVHVSVEP

SEQ ID NO: 901 - protein, 141 aa, Homo sapiens
AGHSGPAGLWSVAFSFGGRGFVPERGTCPAYPVPGALQPQMPPPYSSSRLYPVLSLPSGRAPSPGADAEVEPWPPLPAPAGPTAASAPAQLRAAPAPRRPGWAAAAAAPGRRRGVGAPPGRPPPVSSFQDRLPPCISSAGA

SEQ ID NO: 902 - protein, 73 aa, Homo sapiens
AEVEPWPPLPAPAGPTAASAPAQLRAAPAPRRPGWAAAAAAPGRRGVGAPPGRPPPVSSFQDRLPPCISSAGA

SEQ ID NO: 903 - protein, 147 aa, Homo sapiens
PHRSEDAGHSGPAGLWSVAFSFGGRGFVPERGTCPAYPVPGALQPQMPPPYSSSRLYPVLSLPSGRAPSPGADAEVEPWPPLPAPAGPTAASAPAQLRAAPAPRRPGWAAAAAAPGRRRGVGAPPGRPPPVSSFQDRLPPCISSAGA

SEQ ID NO: 904 - protein, 146 aa, Homo sapiens
PHRSEDAGHSGPAGLWSVAFSFGGRGFVPERGTCPAYPVPGALQPQMPPPYSSSRLYPVLSLPSGRAPSPGADAEVEPWPPLPAPAGPTAASAPAQLRAAPAPRRPGWAAAAAAPGRRGVGAPPGRPPPVSSFQDRLPPCISSAGA

SEQ ID NO: 905 - protein, 76 aa, Homo sapiens
LSTAPPPGSRRSPRVPAQTRPCPAAGSRHSPTTMASSAFTPVPMTPPDKSPSSPLPLVPLDSRPYSPFPGQSNGIS

SEQ ID NO: 906 - protein, 43 aa, Homo sapiens
VSRKKMYVKKKIHLWISLIFFMNSVNLSSPKARDWTVSELLKN

SEQ ID NO: 907 - protein, 19 aa, Homo sapiens
QLMDLKLLRDWTVSELLKN

SEQ ID NO: 908 - protein, 56 aa, Homo sapiens
DCQETRPHHSGHPPSLPTPPQPHRRTSEQKRQPRPTAKKRGREEGGGGRRPWGRRP

SEQ ID NO: 909 - protein, 28 aa, Homo sapiens
WKRSSSSSRNIENRKKSEIGRQKLNSIW

SEQ ID NO: 910 - protein, 19 aa, Homo sapiens
KKQLFEKNRSLILKRKGLR

SEQ ID NO: 911 - protein, 66 aa, Homo sapiens
QDEKTLLLGIKILHLDRKINQGKREICLKKEQEIPKKVILVPQETENLMITKPLMILNGQMKRQNL

SEQ ID NO: 912 - protein, 140 aa, Homo sapiens
GLTLDTSYLRSHINVRSVRKPLVISNPFKDMKGVTLEKNPINVNNVEKPSYITSPFKDMSGLTLEKNPMNVSNVEKLLVVPVRFEFMKGFTLEKSPMNVNNVGKPSVVPVLFEYTKELTLERNPMHVRNVGKPSFPTQVF

SEQ ID NO: 913 - protein, 462 aa, Homo sapiens
CFSVCILSTNELTLERNHINVNSVVKPLVILVAFEYMKELTLGRSLINVMNVGKHSIVPHAFMLIKELTLGRSHMNVNSVGKPSALPIPFKYMKELTRGRSHMNVRNVEKHSSVPVLFADMKEPTLGKNPMNVNIVGKYYLILPAFKTTWECTLERYLINVRYVGKPFILPVHFKHMKKLTLERNPINATNVVKPLILPVPSDIMKELTLERNLTSVSNVGKPSDLPHSFKHMVGLTRERNPMHVRNVENHLVISLSFKYMKGCTEKRSRMNVRVMGKHSVCPVYFIDMKGLTLEEKPMNASSVADPSTVRAPFDIMEGLTLERNPMNASNVEKPSDLPHSFKFMEGLTLERNLMNVSSVGKPLDLPHTFKCMEGLTLERNPMNVSSVGSLLDVPRDFKCMEGLTLERNRINVSNVGKLLDVPQTFEGMEGLTLERNPINVTNVVKSLDVLHNFKCMEGLTA

SEQ ID NO: 914 - protein, 139 aa, Homo sapiens
RHTSWYIRKHTQGRNPMSVRSVGKPFPRSHTSQYIRECTQGRNPINVRNVGNSSLGIHTSKLIREVTQERNPMNVRNVGNASTRSQPSQYISELTQGRNPLNVINVGKHFTINQTSLNIRENTQGRSPMNAQNVANLLL

SEQ ID NO: 915 - protein, 233 aa, Homo sapiens
LTLERNPMNVSSVGKPLDVAHTFKSMEGLTLERNPMNVGNVVKPSDVPRTFKGMKRHTLRINPMDVSSVGKALDVLHNFKFMKGRTVERNPMNVRNVEKYSSIFLPCVYMKGRTLERSPMNVSNVEKHSGISLPCIYMKGHTLEISHMSVRYVAKPSLVPVPFDIMKGLTLERNPMNVSTVVRPLFPITFDIMKGLTLERNPINASNVAKPLFVPVHVENMKELIPLIDEKSF

SEQ ID NO: 916 - protein, 122 aa, Homo sapiens
HTLVMGLIRVQCMRSLLIFLVYFKCLRALTLERKHINVNIVIKPSIIQVIFVNMKELILERNPMHVRNVVNHSLFPVLFANMKDLILERNPMNVRNVAKPSVVPLTWEYMKERILEKNPMNV

SEQ ID NO: 917 - protein, 177 aa, Homo sapiens
KVPSHRMAPLLGLVECQGSGAQGQAQGVLKTETEGNSRRSSHSSSHSRRRPSNHSSSSSSSHHHHNSLHQHSSSHSSLEMITGSSSIQVETKKGLEEDLLEIGWKMTGNGMGTVMMIEIIVTVTGESGEGGALTGTGTETWKREIDALVGIETEREILEIESLVERRKKPEERKSLR

SEQ ID NO: 918 - protein, 177 aa, Homo sapiens
GSTRGSTLERSLMSVMIVASPSVGSPTSLSTTGFTLERSPISAVTVGKHLVRAPALFSIGEFTLEKSLTCVMYVEKPLVIAQCSESTRSSTRERSRTDAVSVGRPSATAQPSFSTRACTQATSPTPATSVGRPLVAAPTSSFTSESTLERSPMNVLNVEKPSARAQPSFSIRGFIMG

SEQ ID NO: 919 - protein, 78 aa, Homo sapiens
YTWGESLMITMKMGVISARSHILPSFGELTQEKKPLNVVNVGKPSGRSQTSLNIREHTQERSPMNVLNVGKPFARNHT

SEQ ID NO: 920 - protein, 20 aa, Homo sapiens
KRQGESSGLNLGIAPGDTSR

SEQ ID NO: 921 - protein, 77 aa, Homo sapiens
RKRTLRPRQSFREPLMPQKPHPKNFGSRDKTPQIASQASTASLAIPASAAARMLMRKRRKKRVGSMSFEVPSTKRSV

SEQ ID NO: 922 - protein, 74 aa, Homo sapiens
RKRTLRPRQSFREPLMPQKPHPKNFGSRDKTPQIASQASTASLAIPASAAARMLMRKRRKKRVGFEVPSTKRSV

SEQ ID NO: 923 - protein, 50 aa, Homo sapiens
VCSLGRCQVRKDKKGTLHSRMDKNFAVCCCGSFFVFGLSSYGNQPSKSLL

SEQ ID NO: 924 - protein, 133 aa, Homo sapiens
CNIRGFILVKNPINVKNVGRPLSVAHNLLNTREFTPMKSPMNVRNVERCLVMAHNLLNIREYTLVRNPINVRNVEKRLIVAHSLHDTRGFILVRNPMNVKNVEKPLVVAQNLLNMSEFTQPSLQVNKIEVIFI

SEQ ID NO: 925 - protein, 223 aa, Homo sapiens
CNIRGFILVKNPINVKNVGRPLSVAHNLLNTREFTPMKSPMNVRNVERCLVMAHNLLNIREYTLVRNPINVRNVEKRLIVAHSLHDTRGFILVRNPMNVKNVEKPLVVAQNLLNMSEFTQVRNPMNVRNVGNLLFVVPSLLNIRESILVRNLMNVKNVEWPLLRVHIFPNIKDFTLVRNPMCVMNVERPLRVAYYLYNIREFILVRNHINVRNVGKPLFVVHS

SEQ ID NO: 926 - protein, 187 aa, Homo sapiens
EFILVRNLISVRNVGRPLDSVHILFDITNFTPVRNPMNVRSVGRPLQCSKNLLNIRDFIRVKNPMNVRNVERPLEYISNWLDIREFTLVRNPMNVRTVERPLDSVHTLHAIRDFILLKSSMNVRNVGKPSYVVQTLEYIRKFILVRNPMNVRSVERLLEYANNLLFIRVFILVRNPTNVRNVGRLLD

SEQ ID NO: 927 - protein, 162 aa, Homo sapiens
QKPPLKKCLLTENSHLFLCIRKVITERNPTNVGNVGRLLEYDNNLLSIKEFILVRNPMNVKNVEKPLDSVPTSVDIREFILLTNSMNVKNVERSSHVAQTFEYIREFILVRSRMNVKNVGKPLELEDNLISIKGFTRVRNPMNVKNVGRPLGSMHTLLDIRD

SEQ ID NO: 928 - protein, 150 aa, Homo sapiens
CNIRGFILVKNPINVKNVGRPLSVAHNLLNTREFTPMKSPMNVRNVERCLVMAHNLLNIREYTLVRNPINVRNVEKRLIVAHSLHDTRGFILVRNPMNVKNVEKPLVVAQNLLNMSEFTQLELRYSHGDFENGIWVLWIMEQKYRRSLQP

SEQ ID NO: 929 - protein, 14 aa, Homo sapiens
KKQFLPGLPFLPAS

SEQ ID NO: 930 - protein, 33 aa, Homo sapiens
GGMMPLLPTIAPGFLTVWNGMIQKVIHGQLWHL

SEQ ID NO: 931 - protein, 25 aa, Homo sapiens
LEFWLLCLILGIYSTNCSGTCFLKK

SEQ ID NO: 932 - protein, 98 aa, Homo sapiens
SQQKTMKRNSPQKIKKRKDRRAKNRVLMIMIAKNWKIKIQNQKRLQNRKWKCTLGVMMMMILTNFLKKLKGKLKNQIRSGMGQRRMRITVKKLKSVQE

SEQ ID NO: 933 - protein, 110 aa, Homo sapiens
PHPMVLPTPQSLSCSLGGGQGNGAGGEEGDLGALMVRPGQPGAESLAAGGSLADWPSNGGHVVASMDKWKGPQEEPTIGSIMGSWLKGVLSPRIHPLPGPILRTLRCPRE

SEQ ID NO: 934 - protein, 207 aa, Homo sapiens
ENTRSWTSSLREGKGAGQKPWGMRRKMRTMRTLWRSLRRRGMSHTSPTTCGLSMGWRQHQRKTQLCGACGRGRGWTRRCRTPPLRLLSCGSSGTTCLHPHLPAPPERCQSHRRPRSWQQSGPGRLWCPTAWTCTTGARSSPQPGRLSSLTPSTASGSPARWRRKWSMPTSPRCSGAATSLLPGSLSLCSTGAVPRGQTAGSVSAKTG

SEQ ID NO: 935 - protein, 98 aa, Homo sapiens
TQGPLTRAAPLPRSCWTTVSKPAPTTPAAVAQEPPPLAALTSPPQGLVLLGAPTPQTPVEVTWTWIPLMASSSPAMVFVTARRGIPSTGSGNEAGPES

SEQ ID NO: 936 - protein, 94 aa, Homo sapiens
HQGLSQDSSRMDLLVSQLLTIITALPPGLEVGLHHTHLICLTTKTAIFSTTRLCRPIPDITGLFTMSLHSSLPFPIILLLSIGVPLLTLKWMFR

SEQ ID NO: 937 - protein, 172 aa, Homo sapiens
PLGLVPWTRWCPQGKPRFPAMSTTTATGTTTTKSGSSGMAGSLAQKPESPSPGLLFLGHSPSQSHLLLISKSPDPTQQPLRGGSLTHSAPGPSLSQPLAQLTPPASAPVPAVCSTCKNPASLPDTHRGKGGGVPPSPPLALGPRMQLCTQLARFFPITPPVWHILGPQRHTP

SEQ ID NO: 938 - protein, 189 aa, Homo sapiens
SMTPRSRGPEVLDLLLSRTNNQWTRLSTCIFTTSWAKKWKLNELSLGTARAKRRDSQVPASGGAGLCPTLPMAGQASPRPRGSKDMARKECGCRQDRRLVAMDRPLQEEEPPRHPHRSPPTSCPPLLEAFPLPRASLRATVPRHSSVLATGLHLHRQISLPLRGFLLHQPLPGQHLWLSHRLRLRLPRT

SEQ ID NO: 939 - protein, 159 aa, Homo sapiens
RREAEAPRWKLNELSLGTARAKRRDSQVPASGGAGLCPTLPMAGQASPRPRGSKDMARKECGCRQDRRLVAMDRPLQEEEPPRHPHRSPPTSCPPLLEAFPLPRASLRATVPRHSSVLATGLHLHRQISLPLRGFLLHQPLPGQHLWLSHRLRLRLPRT

SEQ ID NO: 940 - protein, 118 aa, Homo sapiens
SAPLPSPLGSGPWRRTCCSGCFVRILRSDWARGPRGHKKSGTIPSSRASIGWLWLPGRFQPHSGPKSAQSWMWATLRRNSLGWSLSTHPLAAPHLGTPESFRDTPLWHPPFSLTTTTR

SEQ ID NO: 941 - protein, 32 aa, Homo sapiens
QKQKEISRGWIRLRLDLYLSKHYCYGISCRKT

SEQ ID NO: 942 - protein, 38 aa, Homo sapiens
QMREMHLEEALLPIHIQTLTISLSRKIQIGHVLCLMPN

SEQ ID NO: 943 - protein, 52 aa, Homo sapiens
QFGDKNSQNTTMQIQSMVLFRYYLLQPVGMEVFLKKKLMNILKRVPKSLGLT

SEQ ID NO: 944 - protein, 46 aa, Homo sapiens
IPEHPSTMDQEHSSVTFIPVVTDMVISQKGTKNTIMKLPICLSMTS

SEQ ID NO: 945 - protein, 136 aa, Homo sapiens
SITEFILERNPMNVMSVEKPLVDAHRLLNMREPTLERNPMNVLTVGKPLVKVHLSFSMRELILERSPMNVMNVGEPSEKKPTCMIIREFILEKNPILVRNVGKTSAEVQLLLNTREFILEINSRNREIKEFAECFS

SEQ ID NO: 946 - protein, 134 aa, Homo sapiens
VVNLLDMKEFTVVKNLMNVRSVESSLDLRQPLFNIKEFIVVRNLMNVRYVGRPLDIVQPLQNIREFILEKNPMNARHVGRPLDIVHPLPNISAFILMINPMNVRSVGIPLVLLGILLANRKFTLVRNHLTEINV

SEQ ID NO: 947 - protein, 207 aa, Homo sapiens
VIREFILARNPTNVMTVGKPSLRMQLLLVMKEYIVERSLLNVTSVGELSGIIQLCWNIRKSILVRSHISVMNVEKPLGRAQLLLVTKECILGRNPITAVNVENLSGIAHPLLVIRKLTVEINRISVVTVGRPLQRAQPLLDIREFILEKNPITVRNVGKPFGTAQALLNIRDSILGKNLINVMNVGKLFPEVQPLSNIRKFIIKKEP

SEQ ID NO: 948 - protein, 79 aa, Homo sapiens
FLAKQVALLHLQILQNQLQEKDFSLAKKTPISRDFQVLEKNYSHHNTVKWPIKQTLPVTLRKMMMPIRLRTAMTSILNQ

SEQ ID NO: 949 - protein, 79 aa, Homo sapiens
FLAKQVALLHLQMLQNQLQEKDFSLAKKTPISRDFQVLEKNYSHHNAVKWPIKQTLPVTLRKMMMPIRLRTAMTSILNQ

SEQ ID NO: 950 - protein, 79 aa, Homo sapiens
FLAKQVALLHLQMLQNQLQEKDFSLAKKTSISRDFQVLEKNYSHHNTVKWPIKQTLPVTLRKMMMPIRLRTAMTSILNQ

SEQ ID NO: 951 - protein, 25 aa, Homo sapiens
NSLEERTVISLLKKSKECRSSLGWR

SEQ ID NO: 952 - protein, 39 aa, Homo sapiens
CLQFRKMTMGMKQNQSSLKNQMKTKRKRQKKLLILKRTY

SEQ ID NO: 953 - protein, 57 aa, Homo sapiens
KGRRVSKRRMARKKANRKHKTSWVGFSINTKNQLSQLSRHPGPLQKKVHLPFLHRKM

SEQ ID NO: 954 - protein, 39 aa, Homo sapiens
LLGSICLLLIKLDHFLTIYYRMNYNTLKMQIIISPHAKQ

SEQ ID NO: 955 - protein, 13 aa, Homo sapiens
KKKSKLPTMLTQA

SEQ ID NO: 956 - protein, 43 aa, Homo sapiens
CLVFPEKHHLIWLISFWVCFRETKKIEWTLKHFLAILFLSKVQ

SEQ ID NO: 957 - protein, 132 aa, Homo sapiens
RTVEMDLINVSFVGKPWIVSVYTLPMNELTLERNDMNVNNVVKPSVGTVLFESMKELTLGRSHMNVRSVGNHSIFPVPFADMKGHTQERSRTNVRNVGKPSIVPVLFTGMKGLTQEKNPMNVNYMGKHYLAL

SEQ ID NO: 958 - protein, 110 aa, Homo sapiens
STQGRNLLIAPSVGRLSTVDQLFADIKKPTVGRSLTSAGTVGRPSRPGTVSVCISLSTPGRSLTNVTAVGRPSSLSIPLPSMAESTLGRSHMNVRSAGRPSVGVQTSPNT

SEQ ID NO: 959 - protein, 41 aa, Homo sapiens
WLQPVRLATFLATTSVRCTARRTPPWPLFPLLPPLGPMTWY

SEQ ID NO: 960 - protein, 42 aa, Homo sapiens
GSWLTRQGYPTPGGEKLQGARRCPPAVIAPLPQPSQCTQKIN

SEQ ID NO: 961 - protein, 11 aa, Homo sapiens
KNPRNTVNSSL

SEQ ID NO: 962 - protein, 428 aa, Homo sapiens
PGGRGRQRRAVPAVGGGRRLPGLRWGLRGQQPGRGRRRQRYAGRRRTECGRRAGRGGGDPGSSCCSGGGGGRGGRGGGARRGRRGERRGCTQQAIYAAAQAPLLVHRAHRHGHPRLGGRALDAGGDQRVPHGQVPLFPRQLHGLAQLRAPQPFAQRLLRQGAARPLAALGQGQLLDAQPQQRVHLRRRGLPPPPQAPQPPRAGPRARAAARGGPGPPRRPAARARRPGLAPHALARPPGGARQPRGQVLQLLRHRQHPAQALPQPPPQGHGPRDDASVGRRALPAAARVPRAPPRGALQGPAAALRVRRGRAGAAGRARGRGATDRAAPPACTSPGGGPRQATPRPGGRRRAPVLPPAAARSPAGGLSPPPWPAPAVPGGDAPSLSSAAGPGNAECAPSGRRERGPARGLCTLNPEEDEFLKSPSNVP

SEQ ID NO: 963 - protein, 213 aa, Homo sapiens
QRYAEQQGGDTPVSGRPGGQLRDRQGAAGPLCQPGHHGSYGPPAARHRTGAHASRHREAAGRVQPGAQPAAARSPAGGHAHPVAPALLAQRLPGQPQARRAGQEGPQAQQQRPGLWKQGGQGPQGTEEEVPGRQGLPAGQLRHALARGLPGVTPWLPVRRGLAATAALPVPAVSVRAPQPPAWDARHPPGHRAPERGGQARDGGAGWGRPAGL

SEQ ID NO: 964 - protein, 101 aa, Homo sapiens
PQPPPGLASLRPGSSIWPLKKSLEESRVTLDLSTVLPSILMARATAAAAKMVTSVSITSTHSTSNLSLRLKKLDLLPGVVAHACNPTTFFLRQADHLRSGV

SEQ ID NO: 965 - protein, 159 aa, Homo sapiens
WGQRAQEILGLQGHSSQGSDEAAGHWRRPLGGSGLPTSVGRCPAPAPRPPPPLSVPSPKAVRWGCYIQTSRAQRRQAVRLGPPGRTWGATLNRSPSQICWPTQGAVPDNCRLRALCLNALPWTRLLASASVKQKGCLSLVLQLGPGVVAHACNPCTLGG

SEQ ID NO: 966 - protein, 93 aa, Homo sapiens
SHLKRRNRKKCILLHLHAPQATVSQLKEQRRLLDLRKEKNHLKKRLEPKGVRCPKSRLGLPALQEPARPQPWAVPHLPRPHHQLHPTLPQLRA

SEQ ID NO: 967 - protein, 79 aa, Homo sapiens
LRKEKLQTKKRLKPKGIRCPKSRVSPQVPQEPAHLQLWIIPHYPRPHHQLHPTLRLLRIRKPRPNGRWMQEEMFPKTTQ

SEQ ID NO: 968 - protein, 135 aa, Homo sapiens
SCPHWGPELGWGARVLRSSPQGPSVPSASHCPTWSSRHPGATMPSTRWQRGRERPDTSSRYGCPGLAWCGPRRGPRRVRRPRAPNSGCPEWASAKVRWSLGKGPPAPRRRRRRRKRAVGKGPRVAGAGSGSACHV

SEQ ID NO: 969 - protein, 195 aa, Homo sapiens
VKTLAHLPAQSLRLSPRARRLRHRVGASRKPRLLAGRKTPKRTTRSPRCISQRTHCCPGMTGRSRRGSLRPPGPCQAGGSGSSARTHLTTKSTSRSPSCPSPRPLWLCCRACSLMGRALWLPGAGTMAPTHPGLLGPRRRRRRRKRVVLRRRRKRRRRKTGLKRKRPALRRRTRRGPWFLRPLSRECRLTRPITC

SEQ ID NO: 970 - protein, 79 aa, Homo sapiens
RTLTASSRSWMLLQQGLRLPRRGTVALRRAVLRATHQPGLEVGAPAVPNQSRGARPPPRGGPGLLVPPPTHNGPPSLRF

SEQ ID NO: 971 - protein, 121 aa, Homo sapiens
PSEPGDPARLLQPERGRFSHHPDNVWLRRGAGRALPPRVPAGRLRRQGLHRPERGPALLDRGGHGSSDHQAQVGGGPCGGAAESLPGGPVRGRAPQIPGEREGDAAAHGPPQDTYDPPPHL

SEQ ID NO: 972 - protein, 43 aa, Homo sapiens
GGAVESLPGWHVRGVAPQIPGEREGDAAAHGPPQDTYDPPPHL

SEQ ID NO: 973 - protein, 23 aa, Homo sapiens
ETPGVGPPSTTQQRTGRWSAARP

SEQ ID NO: 974 - protein, 56 aa, Homo sapiens
TTPLPLTLSLRVRCRIQGRSNHPHRGPTISPTNTWDPLPLLLCTQQRPFHLDVPAA

SEQ ID NO: 975 - protein, 31 aa, Homo sapiens
APMIIQKRRKKGKRGKKIVAQVEVAVTMMLK

SEQ ID NO: 976 - protein, 34 aa, Homo sapiens
WGRGLDVISMSLQLFQNKVIKRAKRAKKTGTWMN

SEQ ID NO: 977 - protein, 34 aa, Homo sapiens
WPLRLDVISMSLQLFQNKVIKRAKRAKKTGTWMN

SEQ ID NO: 978 - protein, 45 aa, Homo sapiens
GRACHCAPPGCGGGENSLIQTWRFGGSSREREASQRGLERGNQHR

SEQ ID NO: 979 - protein, 139 aa, Homo sapiens
LSTRGPTRVRNLMNVTNVAEASVRDLISSNTIESTQGRGPTSVMSVGRISVRTPTLCVIAEPTRERSHTTVTNVGKISAASHTWFSTRELTLERSHMNAMLVGKASAGALISSHTRKFTLERSLMSVMSVGEALVKGQI

SEQ ID NO: 980 - protein, 302 aa, Homo sapiens
YTLERNRISVMNVAKPLAGGQLLTNIRDFTQEKNTITVMTVAKPLVRKQASFTISRSTQETNLISALSVIKVLVGVPYLLSIKEFIPAPSRMSATSVEKPLFITHPLFPIRKSTTKKNAISVRNVGNPSVRVALFSIREFTLGKNPTNVTYVKKPLFKGQVLQNISEFTLEKDPINVISVGRRLLKDQSSRNIRESTLERGPTSVMSVGMPSEESPASFSIRESTLGRSPTNVMSVEKPSDRGQILVNTRESIIDVVPMYVKSVGNHSGRTQLLLNIRLSTKEKNLFLCDDYREVISQSSGR

SEQ ID NO: 981 - protein, 149 aa, Homo sapiens
CLASQVCPSGAGAVVASAPPLPSPRLSPAPASPPCPGPGVAVVVASAGSALRVLVEWVAMAAGASTTWGAPRGYPSALVVAASGTGLVLVLEAAMALEVVPVVDLVSAVELVVALGSVAELALEVASVALAFLSALLEVSKRSLSTRVS

SEQ ID NO: 982 - protein, 144 aa, Homo sapiens
WPAHPPPSGATAAAAGVSVPTQPGSLGSAALASAASPCPAPGAVVAWVAHVEELALAAAVCMAWGAPRGSPLEGAAVPSVAAMAAEPEAAMALVAPGVDLVSVVEPALALVWVVEPALLVALGALASLCAPLEASKRSLSTRVS

SEQ ID NO: 983 - protein, 309 aa, Homo sapiens
PVQGVLGLPRLGSGAGRSPRMWKLQQGRRMDKGPARARTRTSIASIRLRSKRICFQTSSRRSACSSSSSSSSSSSSSNSSSSSSSRAPRSLQRPPLPSPLSPGPSWAWTGSCWGRAAGLGRPRAVRTPSRRCPRSPTCPRAWPPSPGSPSNRRPPAASRSPRRPVSRQRNPRPKTRPPPRLSHFPRPGRGRKRPEPPCEGLGTRMRRVRRMLLRMRPGALRGRSGPRRWERTPRRGWGKSRRRRRKDLTPPRPLPCPAAPRLASAVSSPTRSSPPATSRPPPGSSARPITPRLSPLIRAPGSRGGRNPP

SEQ ID NO: 984 - protein, 175 aa, Homo sapiens
CTAASAARRSGPRSSSSSSSNSSSRRRPPAARSRRRRAAPSSAPGSPRDRGHWTDTSEWRTTRKISNTWLSTGWFTMTIALELCDRINVYGMVPPDFCRDPNHPSVPYHYYEPFGPDECTMYLSHERGRKGSHHRFITEKRVFKNWARTFNIHFFQPDWKPESLAINHPENKPVF

SEQ ID NO: 985 - protein, 64 aa, Homo sapiens
CTAASAARRSGPRSSSSSSSNSSSRRRPPAARSRRRRAAPSSAPGSPRDRGHWTDTSEWRTTSP

SEQ ID NO: 986 - protein, 436 aa, Homo sapiens
SMTCCTTASASRPGSCWPPCRRSWCPSTAPASWPWRKTSSRRSPGSCSSGRKTATSMTPSFSSYRAQPWGLVSTRPPSSTSTPQWSSRCSWPSSSRSRPSRRSTRSLSPAWPSSSSSSNSSSSSSRCRRWRLKSRPRLHRLLHPRPQHLPLPSRPPPSLMTASLPSRCLALQSTKLQEGSRILQLPAPGAPGHTTRSHQTSPLGLTSLTPWLLGASSSRQSSHPTRTTRAAHPTAPPGTTAMRACGASSAVTPAGTASATRPGTTSPTPPGTASSRAPGTASTSSRPGAGASASHPSACSGPHTSGGPSRPTSSTRSSTSLRTPTTSTASRPASCRTTSRHGTPSSGRPIPTASTTPRGTSLPKWGPLTTTLATACLILASTSTRLGLDPSTLTSALPPMASTGSPHTCGDRAHPTSTTMTPAWSPMCPTSISLLG

SEQ ID NO: 987 - protein, 516 aa, Homo sapiens
GTVPILTDIKEFPQERNLLRVLSVVGASDRTRTYVTTPEPLWETCPIDVMSVERGSGINRFFLFIKGCTQEGDPINVRSVGRHLVEVQTCLSIRGSTLERNHINAASVGRASVTAQCFKSIRGCTQGRSPTPAASVAKASVPSLHCTNTSTFTLEKSPTAVASVERDSAAAPTSAVIRRHTPARGPTSVTSVAKVSVTTRTFKLTREFTWGSICTNVTCVVRVSVTAQGFSCIRDCTQERNPTNASAGRALAGAPTSTSIRGSTQERNPINAVSVGRASGGIQTFTATRGSTRERGPTCVTCVGRVSSTAPTSLSIRGSTLERNPINVLSVAKASVTAQGFSFTRESTQARNLTDAKSAERALGAHQAFTNISESTREKSPIRVISVARDSVMALIFAPTRGCTQERNPTLVVNVGRVSDMAQVSLVIRECTLARSHTDATCVGRAIVRAHIFKVIRGSTLVRNPINVRSVGRALAATPVFMFIRESTLERSPIRVVCVGKASVIPQVCGTTKECI

SEQ ID NO: 988 - protein, 158 aa, Homo sapiens
ATLERSHTNVRSVGKASAGPQICWTIKEAILERNRISVMHVVRASVVAQILTFILESIQGKNPINVRSVARASARPQIFWPIKEATLERNPTNVVHVGRASVGAQILMYTVESTQERNPINARGVVRPSVSSPAFRCIREFTLERNHISVQSVGRASV

SEQ ID NO: 989 - protein, 191 aa, Homo sapiens
RDGSTDPLSTTLPANRARLQPRRPPGRGHHQHHHHHPRRGTRRGWWSCPPRSGSCSPSSAPMPPSTAPSAWSAPAGTASRRRPGGCCPWEPWSRSAGSWGSSLSVTGTARSSWPSLCTRSASCSRWSPCVTGTHVGRVRSSAIWSCWTSLPGRTLTPCTTSTSAKAEPPSPPLSPATSPPSTWTGRSVCRG

SEQ ID NO: 990 - protein, 22 aa, Homo sapiens
GITLTHTQVLVLTSAQTATWPL

SEQ ID NO: 991 - protein, 134 aa, Homo sapiens
VMSQGSWRQPASPWCQRTGRSPAPHRLCQLGRRWTTWGTAPRGPPGSSSPPHWPEASRGSSCGLPWCSPATRSICTCAPTPCHRSNVTSSACSSSCPSTPSTPGSASSSSETTSTTSTSTLCGTATKPLSFTAS

SEQ ID NO: 992 - protein, 35 aa, Homo sapiens
LWSSSPAPTMDRSSSEWATTSTTSTSTLSCVRTRP

SEQ ID NO: 993 - protein, 335 aa, Homo sapiens
DPRTDWLLRAGGPGPGDRIRPRTFKEGTPRQELADPGGATDPRGKRTGAKSRERGRKGTRARPGRRAARPWGFCGPSGARLASSHGVRSVGDPGPGAVPGGLGGSDPGVRAAHVAGDRLPGPQHRDGADHLEGAVDVVRGAEHRAHAVQSVRLGAGSEHRGAGGAGAHRERRAAGVRCALRDPGGRAVHHLRGPGPGQGACGPHGRRALPVLRAAGARATLLVRQHCRPRVLRPVCARVAEVRAGRSAVHRLGGHRAAHGRRLPLVLRRLGLHRPSRPQLPREVLSAAAAHGHRRLRQEELRLRALGTAGPLLPATPARRWISLGSPAWTAASAG

SEQ ID NO: 994 - protein, 200 aa, Homo sapiens
PRGLACCQGWGATRACAPTSSAPTCGWTPRAPVSASVAGTRTVRLLRSAASTCVDCTAAWQHASPAAQLRRRQRPPARALCAHSRARTATSGTGSPCAAAATAVRRSPASPAPRTASPTTTAAIWTPRPACGACTSTSCPASTCSAGRPAARGRRRPLPAPHLGPRPCLLPCTAAPPHRRCRLGVRPASTATSAAARRLL

SEQ ID NO: 995 - protein, 75 aa, Homo sapiens
ERWPSGVFPMMSVGPCCWQMGRALEILGAAVEAARVGEPPVGLPRPVSQEMWWRHAAAFCQWSVLTLSTKCTLLL

SEQ ID NO: 996 - protein, 61 aa, Homo sapiens
RRVRGPARAWGGSSGSCSPPQRAHGVQTARGHLGRGGDGDPDAAAGGRAEQPKGGVGPVSG

SEQ ID NO: 997 - protein, 144 aa, Homo sapiens
LCGPLVTSASDLPPLHVQHHRGRFIFPVPGTLSILPRTRSKTPPHSPASRPCPLPPPCCLPVGPFPECSGSAPTTWSLPAIPGARHGPSASPLPQSCTSPGSRRAAAPGRSPAPLCTRLGTEPPPIHLTAPCCLPSAPTPGQAP

SEQ ID NO: 998 - protein, 42 aa, Homo sapiens
VHLHLYLHAGSGRHAGQPSGAEHLRAAAPRGQHRPAPQAAEA

SEQ ID NO: 999 - protein, 107 aa, Homo sapiens
CCCTHPRVMGGPPKARCPRVGCLHSQLPHPHPTPTSDTPKVSSLARRLDFQEEPMTGFYVGWAEATVAAARGLLLALSFASLRPRSVVIQQPPSPLPPQLSVTPTVS

SEQ ID NO: 1000 - protein, 191 aa, Homo sapiens
TPQPGHPQTRPSPAAQPCPFPPQCQQLIHCPCFQRQGLWQHPRHLPTPASQCLLCPWTSSTSLQSSPHLSLPLWRLSWHSCYPVIPSPRGPQTCPRPSSPASLSFRATPHSHPRWPLPHSLSSPAGPRSPDSHVLVQPPGPPHHRPWVGPPHRSFSPAAARPCSSTCCSWRKPLRVALEPWGPQGPQRQQL

SEQ ID NO: 1001 - protein, 282 aa, Homo sapiens
PHGAARRRRWRQQRWGGGASSLSRGRLAAPSLRLRATLRPEPVCRRRRRGRRLPPTTWRTTKPWPGSAAERRRRGPGALRGAPAELSRPRLPQPPVQLLLPQPQRLPPARPGLRAELPERWHSGLRRGGGCRLQAASLLQRLRLLVVFVLRSAALRGHGGRRPLRGRRGNSPAHRHPHPQPTAHVAQLGPGLPGLPRGRLQWRAPGRGRRQGPGGHGLAVLGGCGGGSCGGGRLGRGPTKEPPRAHEPREQRRRGAAARPDPSAIQSNGSDGQDETSAIWRD

SEQ ID NO: 1002 - protein, 108 aa, Homo sapiens
TPPWWSSPSPETGRGRWWAAGSSRRSASSTRCGPAMVASCSQWTTRSTSRWPRWRKGRLSSWSLQTLSAAPASETPSPAGASSTEPTALHRMPPARKSAAARVSASTF

SEQ ID NO: 1003 - protein, 157 aa, Homo sapiens
ARMCPMAHCCVRRPTMCPPPSPRPSPLTRPAPHWYWLRPLQTPRRPRTCMTCRPRLLTSTTCPLACGGLARAPCTMCPVNGCFLLRWLMVAWSTVVCMRCLPQLNVKPRQRASACRPPAPAAHAAASLRPPWRWQGRAGNPWSWKLLWRPWHGCSRV

SEQ ID NO: 1004 - protein, 63 aa, Homo sapiens
CGEYSGDRQLTRQILPFLANKAAATTGISSVQAPCQNRLGMSVRTHAAARPAAASSAQWTASS

SEQ ID NO: 1005 - protein, 29 aa, Homo sapiens
CQNRLGMSVRTHAAARPAAASSAQWTASS

SEQ ID NO: 1006 - protein, 69 aa, Homo sapiens
WKVCLFFAITGEQLKSIFYITDQSQWESCLFGPVAACLATHFSSSFSKCVNSIVVLNGKCHKSKYNFSG

SEQ ID NO: 1007 - protein, 141 aa, Homo sapiens
ASSMTFSSPQSHCSSQPSSTKRSRCGCGSTRRRKEHTTSTWTPARRSASGWWTRALLTRPPQGPAQQMPPLPVRSCQRRRLRTRLWDPSVSQAWAFSPGGPATSPGAGQWTLPACGKVVWPAVKTTAAEADAKEIVSRAGQ

SEQ ID NO: 1008 - protein, 66 aa, Homo sapiens
HRDRAAQRHLPHLRRPHGPGGARKSGQAAGATAGSPEAVRPAPAAQPALHVPKDANENHRPPGHQH

SEQ ID NO: 1009 - protein, 43 aa, Homo sapiens
EGQRPGGPGVGDPPTDPGPAAGGGLLHPGPGWLQDLCVAGTHV

SEQ ID NO: 1010 - protein, 86 aa, Homo sapiens
PLAMGRLGRVPDGEEPTPASVSSHPRLAGLPFPHPACRPWSRGPVGSGCGGPRLWPSCCGQQAWGAQGAAGRLSLSNSGSVTPTRS

SEQ ID NO: 1011 - protein, 97 aa, Homo sapiens
GALVAAMGAAAERPIAAVGRGGVSTWTSPAVEVAAASMIPVGAAPVAACIVIAPRAPKILRAGASRAAAPGVEAGSHVPLGPPPQLPAAGTARNTRL

SEQ ID NO: 1012 - protein, 76 aa, Homo sapiens
NAHASASVCLCLIMQTSPTVGTLSSLCLSCPGDLEVSATFPEAAHSLVIWMPAKLGSSGATRKTPGVCGLRWTLTR

SEQ ID NO: 1013 - protein, 159 aa, Homo sapiens
STGAVVEGVGRRCLTRAPQSGSPASGSSKLPVPLLNVPQLTDPTALLSSAWPWPKIPLDPAPPPLKVAPGRVMLSPCHLAHLSAASPCHPVWARRQAASCPLPGALPHPPQSCPGDLEVSATFPEAAHSLVIWMPAKLGSSGATRKTPGVCGLRWTLTR

SEQ ID NO: 1014 - protein, 123 aa, Homo sapiens
GFTKASLDTRQRTYSWARRLASSSSGPARAPQGTSPSLSGSPGQQPGPEVPGRPTPQWGCGRRNPTFDEPEAVGSPPDPSPAAAPAPATASAICPSAPAAAAAPTAAISAAPPFPPGTPRRQP

SEQ ID NO: 1015 - protein, 91 aa, Homo sapiens
RQNPRRPGSPGQQPGPEVPGRPTPQWGCGRRNPTFDEPEAVGSPPDPSPAAAPAPATASAICPSAPAAAAAPTAAISAAPPFPPGTPRRQP

SEQ ID NO: 1016 - protein, 61 aa, Homo sapiens
EALQVWHMWQGLWRQFRPHQAPADTPGGAAPPTSGAPTAAISGSHGSYPGTEGPGQAIYLH

SEQ ID NO: 1017 - protein, 285 aa, Homo sapiens
ASPGGTAAPFPVASTWWTTPGHPQTWSMTLSPTTRPGTSAGPAPGMSGPPSGPGAPAAVSPTHLLPRSSVTPLAVAMQGSQTQKMRPPRSQVTSPPRPAPPKPGPTLRSRPPGSHPPKRAWRPRGAACGRPRRRPCSATWGTSSRPQPSPPPQPRSSPHRMGAAPRRENPRRKKPGPHLPPAAKTGPRGRTRPRTRAEGGLWRSPVRTRRARRPAAPGARQSGRKGPRRSHLRPLLWPPQGKGGLTGQRGGRAPQAGTPDRRPAEAHPAPSSCPTGRAPRPRRGS

SEQ ID NO: 1018 - protein, 194 aa, Homo sapiens
RVCQASLGQKEALETRVSRARRAFLDSLVPLGKRESQGLEEKLVPRASWDRRVTKARGVQWGNQALREGRALRGSRAPPEFQGPKACQASKETRAPQGRPGPAAKWVTQGWPASPERKARRASPASRGPRDSKEYVENPATLAPAGMRAPQGFRATLVPPALEDWPGTEACQDSPGDRAWRAGMPLTSTSWMWR

SEQ ID NO: 1019 - protein, 146 aa, Homo sapiens
RDPRATWEQEAFLDSLVPMEFLDTRGKVGPGEGRATMAATEPRETQVHRGPPALRGSPGLPGPKDQKGRKVSLMHCLKRSATDIGVNLESLDWSVSRDLPAALGMWDRWVQLELQGDQDHLDPLDQKDSKATEDLVSTELRVKRVT

SEQ ID NO: 1020 - protein, 204 aa, Homo sapiens
PLAKAMVPPHPPLRPRLLPPQPRQPPPSHWAQEPSRPRSLVRAAQRAPYGPHPLGLGVQRHLPRQPGSSQWILPPSGARDPKVWVAWSHQAPQSSRPLPAEEETSCRHWCCPQTRRSKRAAEPECPPPPPHHWPMGPQQLPCPVLPPPWSPMWCGLSAALLCPSPLSPSPPLAGLRRLQMTQQVPGLKWALGLGCLGAPRWVSA

SEQ ID NO: 1021 - protein, 181 aa, Homo sapiens
QRFLLAPQTLDQGGHNCSRRELSLLLLLLLLLFFLCSVGCGTPRGWAAGWTATERQRAELWASHPTRLLRGLPGHGGLPGPGRCQALLLHLPCRAPILCFLSRDAGQWGWGGLPGGSCGHLCGSCRARGGWSRGPGRRQPPQAALQRGGQVDGSCRGLPLPAWIPTSTRRQGLPSLPTGAL

SEQ ID NO: 1022 - protein, 134 aa, Homo sapiens
RALPAAAARATHHSTCTPRSARPAALSPHSMQRCASTPLAPRSLRRWERPSLSTQILAVRTGPSSAMSVTAASLRRPHSRGTRCRPTVTNPTSVTAARPPSATRATSPATRPSIPVRNPIVATSVGPSSTGQPT

SEQ ID NO: 1023 - protein, 78 aa, Homo sapiens
RALPAAAARATHHSTCTPRSARPAALSPHSMQRCASTPLAPRSLRRWERPSLSTQILAVVRNPIVATSVGPSSTGQPT

SEQ ID NO: 1024 - protein, 145 aa, Homo sapiens
LKRLGKRKSNLYRKIFQMAIVLHPPLYREVAARAALTHRRLVGQTGEATTAAVPSPCPQHRSSPFPMKVARRVLAQRMTCLLIPEIKRMGTILLCPNMQPHQNLTTVICSKGNLLRAVKGSKSLRNARQNSFMKSQPFIVLTKTR

SEQ ID NO: 1025 - protein, 99 aa, Homo sapiens
LSKPRPQAQRQRLLPRHCGAWRFPHGLGLRGSRSPCLKSASSRDWAQLPLCPRPRTARSPAPRVSPQPRSRSPLRGLWWGPGGAAPARALVPRWTTRAL

SEQ ID NO: 1026 - protein, 263 aa, Homo sapiens
AACSGGRWPAPPSGQGRFQLRGAGSPAPSPRPTPATGSGGGSSSSSSSSSSNSSLSSRKCYPRRAGSCGTTHWTSRCSREGCTSKSSGKEGRCLARPRCAAASSTCRSTGSGGSQPCPCPTWSCACRPSTGTTWTSTSASWPRSRACPTWRRPTCCCRPSCPRSPRLGPGRRAGPGTAPRGRPYPWPSPRSGPWCSTWRSAWQRELAPHWRWPYPPRPGIPGAASGWWKSVTLGPASCRRLTSSPWRSLLVPAAPPRETGRSS

SEQ ID NO: 1027 - protein, 66 aa, Homo sapiens
ALRRPEVGPPWAGGVGSSPTEWREGPQRWACLGAAPQHSRGPGMWRREFLLAECWSLCPVGTLRKI

SEQ ID NO: 1028 - protein, 182 aa, Homo sapiens
RGWGHRRCPHPLRAILRGASPSPHSPASRPTHPSRALHPRLCPAHKVTRAVSTPSRVASPMATATGWLNQQPVGTDWSGRPTVSTPCGPMATTASARPCLPQAMRPWLRPHAPQRCHSSHLKMWCPAAPRTVASSPMEPLTTAWATSPPSTQTPEGAPTCACPSSTADATSPTCCRSHPPCT

SEQ ID NO: 1029 - protein, 270 aa, Homo sapiens
VTFSPACGRARTSRAPAVGSASAGTVCATAKAATRVSSASMTTSSVPALPGSSAMTEDAAPWASVCVSLVGQAQAVTVPSAMPPASTAMGASVMDVATVSVAAATATSSRSTRTPSARSTTRRSTRASARTYAPACSARRGAPARRRGARVRNATSRSRWWTSLREPRRWWCAAPSGTRMTTAPTATPWKVTAPLGPTALSWCTRRRTALRAPSGGSSPCSSSSCRSWPCYCCYAGSTVPAARPAWHFSRAATEVTWWALRKTTTCCGRT

SEQ ID NO: 1030 - protein, 94 aa, Homo sapiens
HPVEDKLCKCGRWKPAAIFVRSASCPSTAAPSSRDIYQSPDPHAAPTRCQDAQRNGSLEPAEQACPAWDLTDQAPTSAPTAAQPPPAEEACAGG

SEQ ID NO: 1031 - protein, 90 aa, Homo sapiens
DLRSPPEWQPTSRPACSPQHHQRPPASSTECWQRSPDPHAAPTRCQDAQRNGSLEPAEQACPAWDLTDQAPTSAPTAAQPPPAEEACAGG

SEQ ID NO: 1032 - protein, 163 aa, Homo sapiens
SPSWHPASLTPPCSRARPSNLPATQWPPTRAKNLLSRQLLLMNGHQVGQGVLTLSGPLEPHALRAQDPDPHTLWGWWNLVRVRLPPRRRRPPAPQESPGWTVRQRVTMMMPSSPSCLLRSSCLYRPENVGPSPSVPYPRNGTHLLRRMDAAPTSGRRTTSGGP

SEQ ID NO: 1033 - protein, 116 aa, Homo sapiens
CCSGDPPAVPARGRAPRGPGAVQATCSLARAPRPGPGAQDPALQSLPRLQGFGAPLGRGAVTLRGAPGRQRCPATWATSGWAGGRPPPRPAAQSPAVQLPVGPEEASPPRGSPQAP

SEQ ID NO: 1034 - protein, 51 aa, Homo sapiens
TGSKKDTAYRKHQQKTFCLAGGPARAARGHQCQFCPWGGGGGQLKSRLQIQ

SEQ ID NO: 1035 - protein, 36 aa, Homo sapiens
TCTLTIMPTAPLTPCSQTGPLRAARPLKRSQAPWCI

SEQ ID NO: 1036 - protein, 62 aa, Homo sapiens
WRWASCVRPPRPWSSWSPPQSAMSIMTRRSLWRAARRRQTAWMSWSMRRWSCIKAATGTSWA

SEQ ID NO: 1037 - protein, 46 aa, Homo sapiens
PPPQSAMSIMTRRSLWRAARRRQTAWMSWSMRRWSCIKAATGTSWA

SEQ ID NO: 1038 - protein, 99 aa, Homo sapiens
DAAPASGGTAPVTTCSWWTVALRPTSPSSISWRWASCVRPPRPWSSWSRTSSLSSPQSAMSIMTRRSLWRAARRRQTAWMSWSMRRWSCIKAATGTSWA

SEQ ID NO: 1039 - protein, 93 aa, Homo sapiens
DAAPASGGTAPVTTCSWWTVALRPTSPSSISWRWASCVRPPRPWSSWSPPQSAMSIMTRRSLWRAARRRQTAWMSWSMRRWSCIKAATGTSWA

SEQ ID NO: 1040 - protein, 68 aa, Homo sapiens
WRWASCVRPPRPWSSWSRTSSLSSPQSAMSIMTRRSLWRAARRRQTAWMSWSMRRWSCIKAATGTSWA

SEQ ID NO: 1041 - protein, 30 aa, Homo sapiens
VEKREKRKKRLAARVWMYQNSVLQKKMKDC

SEQ ID NO: 1042 - protein, 118 aa, Homo sapiens
SSSWSCSCGQVSLPSSAASMTSSRTMNPITTRKKPRVHQKPAHQSTRAGGFSAARYENLFSACPQQLRRQTVENVRGSHGSDDDYPTNIWPSLHLFPPSPCTLWLTVLSLAHFPEASY

SEQ ID NO: 1043 - protein, 180 aa, Homo sapiens
KRYFRSCLLTASFFPLSETQRLWLALPSPTINPPHQPSASHHLWLPSWPILEASTGLGPVGTTTLATYYGLTLACPFPQRRGPREGIFIPPETPTPHSCRSCLLVLALEPKPSIPMPSSILFPLLLIIAARYQALPLSIWGLHPSSSGVWHGWTLSLTWSWWLSTSMSHWFCWQMPCAGV

SEQ ID NO: 1044 - protein, 92 aa, Homo sapiens
LPSSRRPPTNGYLTTVTLHCPPGVENALTGSLRSRDTMQTFCLFKPTRPSTAVSWCHYYAASGSLVEGAGDVSEDTELDGTTFLFITTQQNF

SEQ ID NO: 1045 - protein, 84 aa, Homo sapiens
KSGLHLGRFTTVPRPVRRAGPTARWTHHAPGSPSTCGSSSRSCYSSPTAMAASLGGSTRRRASSKLRTQPRWPGCGASARTVPP

SEQ ID NO: 1046 - protein, 171 aa, Homo sapiens
PWRSTRWSRCSPWWWAKCSRTSRRPASCSTSPQIPWTGAPAMCRSGSCGQSTNTGCPPWARPSRSWRARSCAPCRRSSSASARPWVGMCCTPTWTSGSQPRPVRRAGPTARWTHHAPGSPSTCGSSSRSCYSSPTAMAASLGGSTRRRASSKLRTQPRWPGCGASARTVPP

SEQ ID NO: 1047 - protein, 135 aa, Homo sapiens
RRRWQWMTTSCPWMSWAANTKWTCPRASPTSGLRTFWLEMGPTPSHHLPQPLSGSSSAVSFSGGSPSCCGLGLSSASWPTASRLPWRMNHPTTIYIWVWCWQLWSLSLAASPTTRRPRAPRSWIPSRTWYLSKPL

SEQ ID NO: 1048 - protein, 65 aa, Homo sapiens
AKFYARVTRCSTIVLPVQGVACWTERQWAPLLVGASLGGTQSPCPAPSSTRTSSSAASRVSQPPL

SEQ ID NO: 1049 - protein, 100 aa, Homo sapiens
KRASQPPCTRNLKRSTDSGQRAGNSFCGNQWMLCPTPPHFCWLGSPPRSTSSKRGPSSSPPSPPTEAASSTARPAKSRTRPTSGWHIGSTTPPRRRPSPR

SEQ ID NO: 1050 - protein, 302 aa, Homo sapiens
ARAGTAHPARTPTAATAATARPATVGATARPTSTTAGPTRVTTGAPAQTASTRPSATACPASGALSVRRTSTSVPVTPAATGPTARTAWTATRAPAPQASAGSTVRTTRLTAQRAPASTVAPAWTASTRSPACVHPASRAATASTMSMSATHSPACMAAPVRTAAAPTGAPAPRATLAPTARTLCTGVTPRPARTAANAGRPTPSTAASAPAAGPAFTATCPACPVRWLRSDKVLTLPACASMEGSVWTRATRTTAAARRATQAATVRTWWTSAHPAPARTGPPARTTWAATPASAWPATTG

SEQ ID NO: 1051 - protein, 117 aa, Homo sapiens
RLQHLPQYQQSVQLAKIQPLCPTPTEEKAGGSLRAHPWLSAPGCNCAPSLPDFSPLHPQCGISLVPRGTPLDLWTSRPGQEAATRNPRPLLLKFTASVVVPDSSPAPGTTSTWGGAF

SEQ ID NO: 1052 - protein, 83 aa, Homo sapiens
APRTAGQRPAVYTGESACGPCAQLPVATTASSPGVWSVCMPAPTRQCLSTCAPGGPGLPTGSAATSPHVKTWSAETPPGTARR

SEQ ID NO: 1053 - protein, 92 aa, Homo sapiens
WRLRDPRKKRMVSRAPLRMRKAGPLQTPPLGLGDLLLHPLLLQGPATQPWDPARPPCSPCRLNSFWTWWLKPSPAAWRSRGPPSTPPKTPQA

SEQ ID NO: 1054 - protein, 183 aa, Homo sapiens
SDGPSWFRTKARGPWNWPSSRACWGRTACSPPRPPCLASSRFCRLSLTCPRSSASTCRATASTVRMSGVLALVSMFYRPPAPLSPFPSPAPLTRQPMPTWQPWPAAWSALASPHSQWFSSLTATGSSASCGSSCPSGGLGASSPLMGLHSLTQACSPTLYPSPLASHPFRLSTEPPTGALCLL

SEQ ID NO: 1055 - protein, 160 aa, Homo sapiens
RWPWCLAAQGRPRPSSVPASPPRASWTYPWRSSRSQLGSTPPTPAASSPRSAASWVLPTSTALSLRTTWTPRRWPRSLTSSPPRPMCPSSASAEALLWSSPPRSRAPPSCSWACPWSSSCRCCSRCWKSTTGAPSPSSPACTRATRSSWRACAPSPTPAT

SEQ ID NO: 1056 - protein, 152 aa, Homo sapiens
RAEGSTSTMAAPTAAAGRRARRTGMASARGPRARASTRAPGRTASRWSEATPGPAATPTRATGRRASGTGWGWRRRASGCTGGSGHMVSRGATGSGRACAPPLATRVPGVTGCKTGTAWRPTGTEVPTRASGPEACGMATACARACPTAWPR

SEQ ID NO: 1057 - protein, 80 aa, Homo sapiens
ALFTAATSLSSSCIAPRAAGGATSPRWASSAQPPTRWCARHHSAPPTARRSWGWWTTACARSARHSAWRVSRRSAASTAH

SEQ ID NO: 1058 - protein, 121 aa, Homo sapiens
HSPALPSSRTRSSCATRRNCCGTWPLGCTWSFGGHSCGPGAWASARCTGRWADPQAPPAPPPQPACCLGTVTPPSSTSESSSKSWWNSGHGSAVAPHAIPSTWASGRTCQLGGPRRRAWSW

SEQ ID NO: 1059 - protein, 180 aa, Homo sapiens
HGVPGAVRHLRGGGLVPAAEPGGQGWPPLLLHCGSKAYQPQVRLGVRLPPPAWGDDALGCPATAGGGRQPGGAGGGRQRWRVGLAPGELPERPGYGGAGAAPRGAHPLGRAEPEGWQDGLSHAQRPEAQIPRGTQPKRHGRSGPGGGRPRQALQQQALQSPSQEACGAQWHGQLCLHRDL

SEQ ID NO: 1060 - protein, 31 aa, Homo sapiens
WRRGGQGACGRSSAMGCRADGWGRTTSPYCM

SEQ ID NO: 1061 - protein, 88 aa, Homo sapiens
VHLVLQVYQVLKAQRVTKALLDPLARKVTVVFQGLLGLQVHLVKSFSLYQSCPPKKREDILKACKQMQMIIFLITRMEWKKYLVPSIP

SEQ ID NO: 1062 - protein, 115 aa, Homo sapiens
RPRTRQASRQEHKALGCLRLLPTPAGRRAANPRRKSRQHWGPPPRLTTLPFSSRIFYRWCRTPTSLLNRPSTRSPGTPHSPTGSCGGGQRTARRSPSSAQRSACLGPWPWVAGPR

SEQ ID NO: 1063 - protein, 119 aa, Homo sapiens
EIEVPRTFPKAQELCPKLWLPGGPWDRNSSAPQMSWLLVISLQHPSFLMKLPQLRVNRPSLRWHHRLPPPSCCQQPPSPSLAPAVPLAPRPLPSLAPAQLPVACPAPHCHPWGRIKTAC

SEQ ID NO: 1064 - protein, 80 aa, Homo sapiens
ATWCGPTSSATATSASTVASQGTPQGPHGRPRSQGPQTRVARACPCPLSESPGQLFAPHLFETLDVFMAPPPHLPPPSVG

SEQ ID NO: 1065 - protein, 39 aa, Homo sapiens
ESSTTRCWGEGWSDGQHACPHTHGESLFPGPHTGQRGGG

SEQ ID NO: 1066 - protein, 92 aa, Homo sapiens
LVWTGLRERSGGCHKHSRWPWVFFGKKSRDAVQTEYTRDSGGFCRLWKTPKWLQCYIQNTAWNTKKCCSHSRSAGLGQACQRQTEPSQHQWC

SEQ ID NO: 1067 - protein, 51 aa, Homo sapiens
TTQPTTQAPQSPPPLWATSLHPLLPWPLLPPQCCPSQEPWSACRVSHTRLV

SEQ ID NO: 1068 - protein, 98 aa, Homo sapiens
IFYRLTVWLQLSVRTPIWNRKRKVLRDKKQLAKSSEPRRPLGRMPRGRPRRGAGHHRERPPLQRGMRARSRSISVPARLLPSSRTALPACSHHLKPPW

SEQ ID NO: 1069 - protein, 133 aa, Homo sapiens
AQKAGMDLLVCKVSEGRKVTWDHLESLDCWGCRALQDPLVSQAPLDREVLRVCLERSASRESLDLLGPRDPLERTGQMDHQVRQEPRENQEKEGKMVCLENQAFGEKLGSRAWQADLERREKQASQGLQASQV

SEQ ID NO: 1070 - protein, 78 aa, Homo sapiens
RITSPIFLRKFPLKKLMADLLPVQEPMKRASKEVVGKRKTKLKLYHLNLKYNLEANKNFSFLMKKKKLEKTTPSSLAQ

SEQ ID NO: 1071 - protein, 75 aa, Homo sapiens
LRSEADPGHDDGQRPSGGAAAAPRRGAQLRRPRHSHPTRARRCPGGLPGHAGGAAPGRGAAGRARCLGPSARGPG

SEQ ID NO: 1072 - protein, 149 aa, Homo sapiens
DSVDGCYRGYRALLLPLHHPLCCGCLHRRHRGHRGGLQLQFPWVYYLHLWPGCSVIWTFFTSLQCLVLESETKEQESQETGESNSSRGKSEKLVCLRLNTTKWAIGPGKRALTLSPNSPRTMVGENRLGVGADWKNGGGRVEGLLLCEE

SEQ ID NO: 1073 - protein, 37 aa, Homo sapiens
KKGAEESGPFNRQVQLKVHASGMGRHLWNCPAFWSEV

SEQ ID NO: 1074 - protein, 100 aa, Homo sapiens
SGMKMNASTPFLESSAWMPAAVLSGRLGAPSVRSAPNLAPRNTRRCAPAGLALLTEGMFLLGGHFTKTSMNAKHFLGCALMGSAEIQSEASNAVAIVALL

SEQ ID NO: 1075 - protein, 35 aa, Homo sapiens
KNRGSCTAERISFGFIFSVCHLTSCFKEQTKKHIQ

SEQ ID NO: 1076 - protein, 58 aa, Homo sapiens
KTGLPKGRSLSGLHRGCLMLRRSGPWGVMLPLMVTSSSLRGTVTAGRAFCSRASPCLL

SEQ ID NO: 1077 - protein, 401 aa, Homo sapiens
AGAGRLQDSHPGQRPTRHHAAGHRTGAGAAGDADDSERNDLAAEGDGALAGQLCHRDWPASPDEYHAELVFLIHTSGGGYHRGSDGHHTRHSAATAAGHIAEGGALGLRPHPGLAVRDEGPSELRLACPDPVREEPLGLRGGLPDRAGRGGRRPGPRPPLHCGPLYGAPRAAAPGLQAGDAGPGAAQHRLQPGQPPCRQRRALGLLSQPLPGPARALCHRPPHHSQHPLCPNAVRYSAPLDSLGARSGPLRGTPGRQATGCRPGAALPAPGRGSHRLHHHQPLAPHAHQPAALWGFHRIPGQGPGDLPAGARRAPPVLTVLGEPQTDLQGQEETHAFGAGAFWLRDSGVRGSGDPPRPCVPHPCSPIRPTWHFSIIKSGKEPGWRWGQGEQHPATCVPGSL

SEQ ID NO: 1078 - protein, 38 aa, Homo sapiens
NLSFWTPLQTSKNAQEKNAFHHTVRKQTLNFHFWTRGI

SEQ ID NO: 1079 - protein, 125 aa, Homo sapiens
ERNPMNVHNVVKPSLIPVFFKDMKKLILERTRMNVRNVGKHLLLSVPCIDIKRLTGKKLTLERTHMNVRNVGKHLLLSVPCIDIKRLTSILSKCMECGKAFINFISFQILVRNTLEIDPVNVSTW

SEQ ID NO: 1080 - protein, 125 aa, Homo sapiens
ERNPMSVNNVVKPSLIPVFFKDMKKLILERTRMNVRNVGKHLLLSVPCIDIKRLTGKKLTLERTRMDVRNVGKHLLLSVPCIDIKRLTSILSKCMECGKAFINFISFQILVRNTLEIDPVNVSTW

SEQ ID NO: 1081 - protein, 146 aa, Homo sapiens
NRPGHRTRLPVALKAPSTSQWTPGPRTELTKHPLRLSDILRGHHTRSHRPRVTLLHPPTPHHPTPIRRPCIQSEVPTPSRICMPREPTTHSRCMLPSLMSSTIPRSSSPTAFPLLSTQHLLPPRGPTVWPWAWWQAPPWQCQQVPC

SEQ ID NO: 1082 - protein, 134 aa, Homo sapiens
AVTRSPVRRGRWSLGASAPGPVEVEFRREECSVQEASVIGQKDPHPPCLAMSTCAVTGPLGTGTCVPLPVEVAFRRGLSNVCPQRAIKLKTKTNVYVITNPDLQNSKNATSRPARKVPIYFALRTNCQPVSARH

SEQ ID NO: 1083 - protein, 24 aa, Homo sapiens
SKKYKMMLVFAFSLSQMMGQHPKG

SEQ ID NO: 1084 - protein, 52 aa, Homo sapiens
ARMLRFYMALVWSTSTTMHFIGQLKHFKMSFMLTPAFVEPRKFIYDLGSCSK

SEQ ID NO: 1085 - protein, 79 aa, Homo sapiens
VTSTSCWKIIQKHYLHIRDITVYRLTTGRMLRFYMALVWSTSTTMHFIGQLKHFKMSFMLTPAFVEPRKFIYDLGSCSK

SEQ ID NO: 1086 - protein, 79 aa, Homo sapiens
VTSTSYWKIIQKHYLHTRGTTVYSLTTGRMLPFYMVLVWSTSIIMHFSGQLKHFRRCFMLIPAFVEPRKFIYDLGLCSK

SEQ ID NO: 1087 - protein, 29 aa, Homo sapiens
LRRGWQTSAHHGQGGDRQRAGDHAGHSAG

SEQ ID NO: 1088 - protein, 46 aa, Homo sapiens
AHRRGRREMSVSTMEKNSRSSVRRMEKSFAGFVNCLRNTKVTKHSA

SEQ ID NO: 1089 - protein, 62 aa, Homo sapiens
INGWKLSHMSWMISCVMNVRGPVVGGNLLHFSVLMLPVCSITVNIAGLLSILVLAGNSTSPW

SEQ ID NO: 1090 - protein, 122 aa, Homo sapiens
LQLLLGELRLRQGPDDIREPGCLGPLSVRRVPIPNNDCHLWDQHCGVCVGAQHDQRPPEGLAPPAGLVWTHTGCHVPGSVSHLQPPGERLPGLHLYPVGSGPPHPRDPPARPSGRHLSHHHQ

SEQ ID NO: 1091 - protein, 91 aa, Homo sapiens
GFCEFQRSQGGSPGGDDGPGLGGQDHAPLQAEGPPAGGDPAHCWFQRGASESSWARVTDSLGRWGAGPAQSQLEGLSGRHRYPRVRAGQHR

SEQ ID NO: 1092 - protein, 240 aa, Homo sapiens
LTRAGCEASSGRWQPGRASTTGSCCAGHYVAGKRTPWPEWMKPKKPFKQVLITEGPYVPRSWSSGGKLCQCRCITDSRRTVPSGRPRRCWTGAVCGPGFSAGGTAAGGQPSRDCSWRGQCNTTTGSCCWRGWPGGRRTICSVSGRGSCTGRAPNCWHRDSAGPASASGDNSWQPGGRSSGRQCGPCGSGPSRCRQRCGPRGWPLYWKGGERRRGCSGRSRPTRGSSSRRVPRGSCALQPA

SEQ ID NO: 1093 - protein, 228 aa, Homo sapiens
LTRAGCEASSGRWQPGRASTTGSCCAGHYVAGKRTPWPEWMKPKKPFKSWSSGGKLCQCRCITDSRRTVPSGRPRRCWTGAVCGPGFSAGGTAAGGQPSRDCSWRGQCNTTTGSCCWRGWPGGRRTICSVSGRGSCTGRAPNCWHRDSAGPASASGDNSWQPGGRSSGRQCGPCGSGPSRCRQRCGPRGWPLYWKGGERRRGCSGRSRPTRGSSSRRVPRGSCALQPA

SEQ ID NO: 1094 - protein, 57 aa, Homo sapiens
ARRTAPQTTAGGPATQTPTLRLTSQTTDEGPAPQTTAGRPASKIPDWRCLTQGSATL

SEQ ID NO: 1095 - protein, 97 aa, Homo sapiens
MSARPPRTPAITAALTRRGATSVAAPLGITEWDKATVSQEWDLTRGSTCHWIQRSMRKMLCPQKHATSAKSTAILRKTAGRREVFMNLIPLLLNRSA

SEQ ID NO: 1096 - protein, 90 aa, Homo sapiens
RQLGMPQWTTSPSTWPCALPSSGGNSRKQGSQEGLEGAPLTPEDLMGVAGRVGVPEEVTVLRSLLCPAWRASVKSSTPSTSHLEAGRSRR

SEQ ID NO: 1097 - protein, 74 aa, Homo sapiens
RQSPEPAIFFTGQGEPGNSRVPTTSPCPRRPMDWRGTKGGQLHSRAGRWPRMDPWVKESMSLGVPAGETARTGV

SEQ ID NO: 1098 - protein, 144 aa, Homo sapiens
LDGLLYWTSLGFVNRPQWTTSGVLMMMVILKVEIKLPFRETGMWEPPPPPRTTASPAATAACCPSARTCSRRTPRPPGPCREFILGTGIKNVTSCCRFCAGSELWARLCPGRRGRPFGWPWLLQGRQPLECSGGWGLDGTSLLL

SEQ ID NO: 1099 - protein, 139 aa, Homo sapiens
TKVTSAPSSRRLSGSVCSTRKTTRTTSTSPGGGRTGRPPRARRSAPVGRPSKVGPPPSRPTTRAPTWTTGTQERAPPCQMGTPSTPQARAMAHPPLQPPRRQSCSRARQTRSGTGAPWGRAGSLTSTSATWTLVRSATR

SEQ ID NO: 1100 - protein, 84 aa, Homo sapiens
LPSSPTAMTTSPPAPLPPTSPQRSIQRQESPGPLTHPSCHRITHSLPELSDKSPTPSAGSSHSKASPCTPFLPVASGTLTPPSP

SEQ ID NO: 1101 - protein, 14 aa, Homo sapiens
KCFRAGVDQRNCLL

SEQ ID NO: 1102 - protein, 84 aa, Homo sapiens
SKKKKKLKKRYFRSQQRKNEMAEKRNILVPRRLVQNLVNEGHVRKKEKTGNGETMTGTMSGMNCTVRSMTGEEAGVRVGVRVEA

SEQ ID NO: 1103 - protein, 64 aa, Homo sapiens
FYCPPGVREAHGAPCDILCNHHLSSTTSSHQHFLNCRFWQSASHQCRILWGHQFWWDISKCWQD

SEQ ID NO: 1104 - protein, 252 aa, Homo sapiens
HGQRPPVRSPVAGLRGPAGFRVPRGRHRPRLPGAEQRGAGASAGAGRQRQLALRAVPAAERLRALHRAGAPGGRAGLPGDQGGGGGRRLGPERLAVVPAAQGHGARAVRRVGAQWRGAHRQAAERARRGQAQASGAGQGQWRASALGHRHAASAPGGRLLSALPAAPRGGPGPSPGRLAYRLPGGGIGLGVFALPLLGVPVRGSAAVQEEQGGLSGSLLGARGPLSRASGGRERHRDPFPELPVRGVSDGRL

SEQ ID NO: 1105 - protein, 228 aa, Homo sapiens
QRPRLHPNLLHPVRPREQQPRPAHRQCQRHRQRLGHQRPGHLLAAAAPGPAPAPRLPGLHQRRQRPPVRPQVAGLRGPAGVRVPRGRLRPRFSGFEQRGAGARAGAGHQRQLALRAVPAAEWLRALHRAGAPGGRAGLPGDQGGGGGRRLGPERLAVVPAAQGHGAWAVRRVGAQWRGAHRQAAERARRSQAQARGACQGQWRASALGHRHAARAPGGWLLPALPASP

SEQ ID NO: 1106 - protein, 228 aa, Homo sapiens
QRPRLHPNLLHPVRPREQQPRPAHRQRQRHRQRLRHQRPGHLLAAAAPGPAPAPLFPGLHQRGQRPPVCPQVAGLRGPAVFRVPRGRHRPRLPGVEQRGAGALAGAGRQRQLALRVVPAAERLRALHRAGAPGGRAGLPGDQGGGGGRRLGPERLAVVPAAQGHGARSVRRVGAQWRGAHRQAAERARRSQAQAGGACQGQWRASALGHRHAARAPGGRLLPALPASP

SEQ ID NO: 1107 - protein, 268 aa, Homo sapiens
QRPRLHPNLLHPVRPREQQPRPAHRQRQRHRQRLGHQRPGHLLAAAAPGSAPAPRLPGLHQHRQRPPVRPQVAGLRGPAGVRVPGGRFRPRLPGFEQRGAGARAGAGRQRQLALRAVPAAEWLRALHRAGAPGGRAGLPGDQGGGGGRRLGPERLAVVPAAQGHGARAVRCVGAQWRGAHRQAAERARRGQAEAGGAGQGQWRASVLGHRHAARAPGGRLLPALPAASGGCPSPGPGRLSHRLPGGGVGLGVFALPLLGAPVRGGAAV

SEQ ID NO: 1108 - protein, 35 aa, Homo sapiens
IAKTVVQKTIMDTVLTKHQRDLAHYMQSYIFPLIL

SEQ ID NO: 1109 - protein, 232 aa, Homo sapiens
GPRNQHLPVCRPGKHYSPDPRHPQHRGVPARPDQHPLPLPAPDPAGPRGAHLPCTEQLQQHRQPRGQPDAPGHRWRRPGNEHTWLLSTAPPSWRQPPVPEHRGKASAGIAHPVPAVTHHSGCSHGRPVSGAAAALRLLHPGGLPAATAAAPAPAASSTRVPAATTPATPTGARPPAPWWPPVAQRQPDSWATAAPACSHGTVLSPPVPPREPWPAIDGDRHRLGAGSAAVPH

SEQ ID NO: 1110 - protein, 171 aa, Homo sapiens
LYPTSVASTTRINEQTNEGHKRKLDWPGSGQPKAEAQMLTCRANGMVYSVISCSPQRMSRLLLANPAPALKPSTTTCFTAWKKPRITSLWTNKSLKKAAWKLQLLIVLQVTVLHCLHNKESPAPAVHDDTKKLFASQMPMYQEAIKVVYKNSARFRSDVWREHLCLTADPV

SEQ ID NO: 1111 - protein, 148 aa, Homo sapiens
APCQGPKWAAPQFCPVPWDGCICGHPLSHAFHFPSGSRGAFPKAPCPSAWSPATPWDQQPFWARPHLGQASKHKLHSSHRELPPIGQPPGAQQRVHRGELWAVPTTPSVGSATTCTRRIPPLPVPWSLTAIRHHLSCRKARRPRDWNG

SEQ ID NO: 1112 - protein, 104 aa, Homo sapiens
NLVSEPQSKGEENQQEEVAAATAAAATTAASAATTASPASARSSEKCPRALESGVFPASLSVWLCPWGSGANWGGAKPHRHPVTHRVLQRQSNSRLSHEERGLC

SEQ ID NO: 1113 - protein, 106 aa, Homo sapiens
CARRSGPLTPASSCGAAILTTPTFARPRRGPPWTGLCVHLASSGRARWLMPVIPALWEAKVGGSPEVRSSRQVWLTWQNPVSTKNTKISWARWWVPVIPATPEAEA

SEQ ID NO: 1114 - protein, 146 aa, Homo sapiens
REERSLQSREEVEVEEASLGSRGWVLALTASGVPAWSAWARAWATAWIAWAPRSSAWAWSWTAWAPWSAWAPALSAWARWASTTWPPALSAWARPWSALALAWSAWVPAWASALSAWPLPSTVWARPLSAWALAWSAWALPSSAWA

SEQ ID NO: 1115 - protein, 43 aa, Homo sapiens
WSRTSPCGGAKGSASAGSTSSGSLTGGNALAPTRPSASEDCWP

SEQ ID NO: 1116 - protein, 57 aa, Homo sapiens
AKMTSEECDSWRTAQWQGSGLCPLGAEPVCWCWRGAHLALCSAVALAPVGFSSSPWT

SEQ ID NO: 1117 - protein, 232 aa, Homo sapiens
GSLCQMWLPLGHGGTSMDMCPTPASGSGRMCQMWLPPGHGGIPTGTCPTPASGLGRTCRTWLPPGHGGTPMDTCPMPASAWGSLCQTWLPPGHGGTPMDTCLMPASAWGSLCQTWLPPGHGGTPTDMCLTPASGLGRTYRTWLPSGHGATPMDTCPTPASAWGSLCRMWFPPGHGGTPMYPSLRPTWCWGLSHQKLSPTHPGPNRAPLATRPSQRSAWEHRALCWTVGHGCL

SEQ ID NO: 1118 - protein, 54 aa, Homo sapiens
TPSRALRGSLAWRSGPLGEKPMSPWRGTLRSPLGGLIRPHRQHPALFCSVRPLP

SEQ ID NO: 1119 - protein, 29 aa, Homo sapiens
RRPFSPRYTLGALGRGSTCFFPTLPRFCP

SEQ ID NO: 1120 - protein, 34 aa, Homo sapiens
PPKQHPWAQLSNLWWSMMISALIPTPSPMTWPSN

SEQ ID NO: 1121 - protein, 60 aa, Homo sapiens
IVVAQQIAVPKCHLSWPLQKLEAKISAIKSLCYSQRKKKKRTGTKIKFALKNQSKKRRIR

SEQ ID NO: 1122 - protein, 33 aa, Homo sapiens
RRKSLGHPLLAMGPQTWALLTHPPQAPTWVAWS

SEQ ID NO: 1123 - protein, 67 aa, Homo sapiens
TTPDKSGSSLRVRSVMCSLLPLSMREVGLRAWSLSLGGWGWHWPQRCGGEWFALPANSITPTILHRC

SEQ ID NO: 1124 - protein, 81 aa, Homo sapiens
EGAGAEGRERGLLLLPRAPRPASQSPEGCRIRTEGGPMGKGGGAASMPADEGHPQIVLLRISKPALPPPTKGKTSLQWSWT

SEQ ID NO: 1125 - protein, 107 aa, Homo sapiens
SKRRRRQQNRGQRSWRVGCPALAWTRWAATAAAAPCPPPSPPLPLPAPPLPALATQHPAWHPLALPVRAPTRLIMSLRRKLELHEGRGRPSQETPHHPLPALPVLRE

SEQ ID NO: 1126 - protein, 82 aa, Homo sapiens
ATSNPPHSTLLLAQCPYAGPGPLTAVDLEKAIAQNAVGTWQMGQPVTPAQGPVMALPVTLWSTARTSAYRGSMAAVLLSAAP

SEQ ID NO: 1127 - protein, 33 aa, Homo sapiens
KNCDYALQMCPKSTTGSSVASSQRRIRTFQETA

SEQ ID NO: 1128 - protein, 54 aa, Homo sapiens
HICRGLLYLVAEFILQWLLLHLLQLKKQSKALQPLMTFLKGNISMVHTTTILYL

SEQ ID NO: 1129 - protein, 57 aa, Homo sapiens
VPHPPTSDSFTGSDSGGDSALRKCEDPAVSSVSEQTSSLVLQPPSAMLCFDKNDFPI

SEQ ID NO: 1130 - protein, 46 aa, Homo sapiens
MPRKVPQTSPIERTREALRNLGKLRSSVTEGPTGPQLPPPQPTPLS

SEQ ID NO: 1131 - protein, 91 aa, Homo sapiens
MTSPLRTLSTCPTICCMGMAQTAGLINPLTSLSPRMALLPSTLSTLGVMVWQCSDFLMKYLKTALRPLPSLHRASQLPLTLLSRCRNSTSS

SEQ ID NO: 1132 - protein, 127 aa, Homo sapiens
WSLAVPPPVRRHAAFENVSSTSRSITFKRCSKILLCSCALLDLRDPWHSSGNTLRGWRRRRQNRFRICRKQALVQTQGRMRFLLLHPTQWLKVGGDEVLSALRSTRRKMRHPMLERLYQKITRQWPL

SEQ ID NO: 1133 - protein, 46 aa, Homo sapiens
CSQCRGLPAGQKGSGHPCWWGLPSEALSHPAQLQVPPEPAPQQPQG

SEQ ID NO: 1134 - protein, 98 aa, Homo sapiens
RMTVGTDTLRAKGVDLIPLETGKIMTEVTLACLKEILGQKLRMVFTVLQITPMGALEVILCLLVYRPVLGLVIQQGLTRMVMIALSNTEVMFQICTMV

SEQ ID NO: 1135 - protein, 139 aa, Homo sapiens
SPMNAQSVGKPLARALIFFSTSSSTLGRSPISAWSVGRLLTAGHTSHGTSGFTVERSLISAVNVERPSPTAPLLSCITGATLEKNPLCAKSVAKPFEIGQVSFDTTSSTRERSPMSALSVGRPSTAGHTSRGTNRFTLE

SEQ ID NO: 1136 - protein, 269 aa, Homo sapiens
SPMIAQNVGKPSARANTSFSITSSILGRSPINAWSVGKTSTAGHTSHGTSGLTMEISPLCAVNVEGPSIAGRTLHGTSGFTVERSLLCAMNVERPLPTAPILSCITRATMRRNPSHAANVEKAFMRVQPSFNTSLSILGRGPLSALSVGRPSTAGHTSSSMSGFTLVRSPLCAVNVERPSLTIPPMSCMKEPTLEKSLLSAKNVGKPLAFEKTSFDTSTSTLERSPMSVYSVERLLPACQGSQGTSGFILERSRMYASNVGKPFVGPQT

SEQ ID NO: 1137 - protein, 111 aa, Homo sapiens
LHIKERTLEKNPSNVLSVGNLSARSMTLLYIRGHTLERSPMSATCVGNPSPRVPNLLRISEFTLEKNRISVLNVGNPSDGTLTSSYIREFILERNRTIALTVESPSAKAIS

SEQ ID NO: 1138 - protein, 193 aa, Homo sapiens
MNRSQCILGKVSMSVMSAGKPVLRVCALYKQKEVALERPPSDVRNAVLPSPWPHLFLTVTSFRLQRSHLCVISVENLSAVVSSYTREHTLEKSPSNVLSVGNLLARAMTLSYIRGHTLERSPMSVTCVGNPSPRDPNLLHISEFTLEKNRISVLNAENPSGGTLTSLYIREFILERNRMSALTVESPSAKAMS

SEQ ID NO: 1139 - protein, 181 aa, Homo sapiens
SLSWSKKRTCAGQSRRPPEKEVALERPPSDVRNAVLPSPWPHLFLTVTSFRLQRSHLCVISVENLSAVVSSYTREHTLEKSPSNVLSVGNLLARAMTLSYIRGHTLERSPMSVTCVGNPSPRDPNLLHISEFTLEKNRISVLNAENPSGGTLTSLYIREFILERNRMSALTVESPSAKAMS

SEQ ID NO: 1140 - protein, 170 aa, Homo sapiens
RQYPGPPHHLVWLSSCGSRAWVALSLQAQPLAHQGFLHPPPPALADGLPLQRSLESWKTITWSICVRHVVVWTAVSEPAVPGLPPMMASGPLLSPVLLAPGLRNAAYCLRRTGTTWGKGRRKSWGGGGGLGVQGRALVTCPLPSSMECQDHGLRGPRRFVWCQRRELGNC

SEQ ID NO: 1141 - protein, 35 aa, Homo sapiens
ARMCGGWGPVASPCASRPPRSVSALWNSTPTSWRV

SEQ ID NO: 1142 - protein, 51 aa, Homo sapiens
FAKRRRKQRKQQVYMFMNVKLKSWRTRPADEEPQTPAMGIQRKMKCMWEVF

SEQ ID NO: 1143 - protein, 60 aa, Homo sapiens
TDRTGPSLSPSEGCLQPGEQGRPVRTVRPPQPHSGGGMPMGTLSAMPVGSTTSFTILTDP

SEQ ID NO: 1144 - protein, 42 aa, Homo sapiens
NKGNFHPRKILVGKKTQTISHQPKKQRKPKRANCVIQRRAKM

SEQ ID NO: 1145 - protein, 72 aa, Homo sapiens
RRHCGKSRGPSRCQWAAGACCVEWSRGCRRWAGGTCLSSPWRLLVPTASTLPPPQANLSPCPRSPVLPRPWA

SEQ ID NO: 1146 - protein, 209 aa, Homo sapiens
GHLYPMGPMVSQAPMDLLGLQGLELQWDHTTLHLIILDHQARLLMVLQPHMLPRDGEMHIHTGSSRLLLIQLRQERIQIQQLGLLITLTIINSKHSHHQQPLQVHQLQLKLMDKEISRIQPQLDRLIIPRLGKSTTRKWVRQFLLRLGLLQVVSQIIVQPGLSIIDNKQPIMPRQVPRECHSILQHLRANNKKWTIQYLLHCVGEKNLC

SEQ ID NO: 1147 - protein, 120 aa, Homo sapiens
RTWWTLVRNLPHQQERILPQRKAVVSLLHESPSRKRVKKGMSRPLGLNPNRPPLQLPGSQASRSPSQHWSSRLSHLLQDRQEKKFPKPLLVSPRKSSLHHQNQVQSRANRKKWLPAQVSL

SEQ ID NO: 1148 - protein, 81 aa, Homo sapiens
GPCTAPDPCCPRLFHPGLWHRSGVRALYLPSATSWRDPGVWWSGCPPGMAGCPAGPQHPCPPGMGSGAPASICWAAQPHGS

SEQ ID NO: 1149 - protein, 113 aa, Homo sapiens
SNKRLQGNSSSSCHRHFSHSHLSHSLTPHLCLLAPPQCPQASWNLSQVGVKIVMCWRPPSPWNRGSCSSWRRAPAVLDSISHSRRRRNQSQNQRGLASVGATGRRQSRHSRNC

SEQ ID NO: 1150 - protein, 61 aa, Homo sapiens
KKCSINGSSKRTTRTRQTMQEAPDFLFLVKDQLLSRIAPSKLSCLGKLQSMLLDRPRLPKL

SEQ ID NO: 1151 - protein, 136 aa, Homo sapiens
GARSHFRRPHRHLEEGTSSPGPLLWGVTRVVLVHCPLYLWGLPHPHQHPGDPHPQAEGALHHHPLQLLDVLDHCPLHPLELVGHPCHHHRHHRHRRPAPGMDQPLPHSLLLWCLPGAWPLVGVGERFWIKSGREFS

SEQ ID NO: 1152 - protein, 115 aa, Homo sapiens
ARGGGPPHPPAPRDLSPARFVPPACLLMDGVQMPPGTVAAGGGVPKDHYRYVPADSAAFSAACHPPRLSFPRSGTQSSSGPPPHPPAPGQTGSVGPGHVLLRVLSPAAPGSTGQP

SEQ ID NO: 1153 - protein, 193 aa, Homo sapiens
ARTKTPCPATSRGWACGSQACPEGCGWRSPRRGCRAPRPAEAAGLRSRSSTSVRSPWSRPYGPARPPWRSWPWTPAPCWTRPRLRAPRGHCPGPCTPRLWWTGTHARCPPRPPMTTWPRMRMTLRSAPSTAPSWARGSLPGPARARPTTPLCLSRRGRPLPWRTTCSSRPRVGASRPAPHRPQRSSRRYSRSA

SEQ ID NO: 1154 - protein, 55 aa, Homo sapiens
QFLSPLWGVQTGADQGFPVRRGYKYYLPAPRAQKQAPLCQLPEPWPKLTSPWLCS

SEQ ID NO: 1155 - protein, 156 aa, Homo sapiens
SAKRSPYRTHLCGVSLQHRQPPLALTWTSHHPGPPTPPIPMKTLLAKLLTYQKASAMACPLCTPRRGPHHPTDRACGCSLRLGVPQVVPNHLQFPSFPAPSLVTRMEGGAPLSPWGCHSLRQPPFGRLLFLHPHRLKAPSLPRVMCIPYLLRDTIR

SEQ ID NO: 1156 - protein, 68 aa, Homo sapiens
HLAPERQQPQPHSTAPTGVQHTPPWPAPSSEGPHSRAPPDSCSRGGSSLLLGAPNPIPAWTPERVCQQ

SEQ ID NO: 1157 - protein, 124 aa, Homo sapiens
REITGSLLMRSKPLGSEDRPGAGAVVSESSLFVVGLLAEMGAASVVGGSWGPAASTAAVSAAAVAGACESLRGQRTAPEPSPDGELPVRPIARAQSMKNFPSAAGRGAPRTGMKARSWRGRRAP

SEQ ID NO: 1158 - protein, 66 aa, Homo sapiens
YEVIYNSWHSTTDRLCSATHRRKDWWPSKSFRATCTPWAPWCPRPPWTSWASRAWNSNGTIQPCTL

SEQ ID NO: 1159 - protein, 79 aa, Homo sapiens
YLVFFCFYVVPQPGRKKSIITLELLKRLGIMPLTMGKRNLFLLTRNIPISIFKMAQIELGDYIRRPFIFSTQMKPLGQL

SEQ ID NO: 1160 - protein, 116 aa, Homo sapiens
AGPGGDRPWAPPSPQTPGSWSCHPFKWSTKESSPATLSTLWAPSTSLSASPCTTLHSCWAPPAPGRLRVCTAAAPPRPARPPLCAGGLGRSCWRGTAVRAPSRSPPAQPGPGPTAP

SEQ ID NO: 1161 - protein, 107 aa, Homo sapiens
APPSPQTPGSWSCLGFKWSTKESSPATLGTHWAPSTSLSASPCTTPRSCWAPPAPGRLRVCTAAAPPRPARPPLCAGGLGRSCWRGTAARTPSRSPPAQPGPGPTAP

SEQ ID NO: 1162 - protein, 22 aa, Homo sapiens
GAVGGRRHSPAQQGEQIPGPLV

SEQ ID NO: 1163 - protein, 229 aa, Homo sapiens
VRPWSRPRSCRWCGCAPWVLQEGLPPQHWGHRPPRNHCEGPCQGGPAQCLPPPQGSMLRSDSRPAAWPPVKASQVLSPTDRLRQSHGLPSPLPQRPVSSSPRALGSCSWSGPCPLRPRLTSSGIWWQNSGASQSSGHPRPQRSHLRLPHLWPASRLWESPHPPPPVTLELSPLLLLPPMGSLTPRTGLRGSWRRMEVSCSWWAQRRRWASRAQTHRKSWPDHQAPHWHC

SEQ ID NO: 1164 - protein, 208 aa, Homo sapiens
TLTSASMGTARTRRVPLSATVSWATWSGRGPQAALMWMNARLEDTTVTVTPPVSTSRGVSAVGACQAGWGMASNVTTWMNASPRSTGAAQEVTVSMSLAPTAAPAARALPGMASSAKTGMNVPRTWTSVTTGSASMRPAGTAVNVRWALTPPRTTGPARMWTSVRKGTSVHLGAVRTCLECSAASAMVATNWTEGVATAQTSTSVQTQ

SEQ ID NO: 1165 - protein, 91 aa, Homo sapiens
TSGCGVMRRTATACTSRACCRATTPARSRARSLCLSPGCPSWMQMNTSIVRSGTMTAWLMWKGPTWPVSPLPKTRCHLTLQAQTTSLCPWP

SEQ ID NO: 1166 - protein, 41 aa, Homo sapiens
APQALLQTRGRTPHGSGGAQWLWNPSLMKTGICSVGTRWRS

SEQ ID NO: 1167 - protein, 193 aa, Homo sapiens
LLLPLQPRLPVTSPAPLLRGCERVRGRALWPGEGHLHEHRRLLQLPLQPRLPPARGRRGALVRGPERMRQAPPVRRRRLLHQLSRSLQVQLLPRLPAQSLPASCVRRHRRVPGPKLLPGWQMREQARELQVHRLSAWLPQPGGRGLSRRERVRRGQPLLAWLVREPPGLLPLHLCPGLRARARRPQLLGCGRV

SEQ ID NO: 1168 - protein, 53 aa, Homo sapiens
KCPPPSLATARPSRSCSSASPSSSRPCSGARPSCTGTRARAWTRWSSPRPRAT

SEQ ID NO: 1169 - protein, 53 aa, Homo sapiens
RWPRPSSATARPSRSCSSASPSSSRPCSGARPSCTGTRARAWTRWSSPRPRAT

SEQ ID NO: 1170 - protein, 91 aa, Homo sapiens
RRSMSRCLTCRTRTAATLWNGSPTMSRQPSVTSHLVASRWQSPSLAIAQPSRSSSSASRSSSLPCSAGRPSSTGTQARAWTRWSSPRLRAT

SEQ ID NO: 1171 - protein, 144 aa, Homo sapiens
NLGPWTLFAQVLLARSLDQTTLYLVSLGQVTTGPKATTQRAPSWLILSWMWYGRRSMSRCLTCRTRTAATLWNGSPTMSRQPSVTSHLVASRWQSPSLAIAQPSRSSSSASRSSSLPCSAGRPSSTGTQARAWTRWSSPRLRAT

SEQ ID NO: 1172 - protein, 137 aa, Homo sapiens
ASLIPASHGRRRWTVLMTQPSARVPTRPSWASHTWRRLSWTASRRASPSSPSCAHPGASTVAPGPPSAPSSSPLLRGFGPAPACRSPRSYLYLHSCHRRRPRPPPLSPSVPPQGPRSPRGAVGVQGARKPGGGEGSP

SEQ ID NO: 1173 - protein, 226 aa, Homo sapiens
GGSQRKISGGHLRRTGDGPQRRTLGGLFRENGGDHPRMTSGGPQRRISGIPLRRTSGSHPRSISGGHLRSISVGHPQSISGDHLQSILGGLPQSTSGGHPQSTSGGHPQSISGARPRSTSGDRPRSISGGRLRSISGAPERKISGTHQMKTSGALLMKTLGTLLMRTSGAPRRKILDALLMRTSGSSQRKTLGKLRRRTLDFLTILDLLVRILGARLMILEVTALL

SEQ ID NO: 1174 - protein, 76 aa, Homo sapiens
SASVKPCSAPLASAVRAALTSSPPDPGPEMPPPRARNGEIASCGVRPSMCASIRCLHPRKSNVRRRSLSFPKEKKT

SEQ ID NO: 1175 - protein, 41 aa, Homo sapiens
TRMKEYILLELKVAASRSIPPAKQLTWGAPARNPTRHLFMI

SEQ ID NO: 1176 - protein, 31 aa, Homo sapiens
LYPCVFSSYGKNINPTKARNRIQESSNIFRP

SEQ ID NO: 1177 - protein, 75 aa, Homo sapiens
NSFHSYHHFRRTGEACTERKIIVTFSKYNWNITIFDYIHVSSLPMEKISTLQSYKTETRRQARNRIQESSNIFRP

SEQ ID NO: 1178 - protein, 39 aa, Homo sapiens
FSYFWELFLFLLSSFRVSRLGKLARSSPEDCGQWLLKQC

SEQ ID NO: 1179 - protein, 48 aa, Homo sapiens
PSWSSSPVPPSRRARTASHQSPVTRQHPTPSPQPRCLSPDTRPSASKN

SEQ ID NO: 1180 - protein, 106 aa, Homo sapiens
SSLVPVFWMKKSLRVMSRSWPLSQGSRQPMNHVNRRSWNARGARGKDPKTNSLTEPRDLHSSNHQDFTGHKIRNPRARTPPQVKRKKSWSRASCHPLRRLPMDPEG

SEQ ID NO: 1181 - protein, 106 aa, Homo sapiens
KRRRSPPRLPNAQPSLAARARMVEARTLRRPSRSPSPSPSPKPSLSHRHPTSVPAIARRPPRSSAKSSTQGGPRLSRRSCLSRSYASAVSSLTSCQTHSVTSNSRR

SEQ ID NO: 1182 - protein, 37 aa, Homo sapiens
KIRQPRSGRSCLSRSYASAVSSLTSCQTHSVTSNSRR

SEQ ID NO: 1183 - protein, 32 aa, Homo sapiens
KRRRSCLSRSYASAVSSLTSCQTHSVTSNSRR

SEQ ID NO: 1184 - protein, 67 aa, Homo sapiens
EIKLLKRRMNYLIMLRSQQGKEIVVTLQRIKRVRMEHMVERRKGASCLERVQGRDKIVHHLILRNIP

SEQ ID NO: 1185 - protein, 61 aa, Homo sapiens
TTVKSHMSTKNPPLERDHINVTSVGKASFRVHILFNIKEYTLGRNHSGVRNVGKATTNACT

SEQ ID NO: 1186 - protein, 83 aa, Homo sapiens
HREPGGGGVRQLLRRPGSAAPVAGRGWTPHRLRGSPLRLTSLHLAPLPDPRVERLGPQRRPVSGWQLHRHFGASGLSEGLGRK

SEQ ID NO: 1187 - protein, 263 aa, Homo sapiens
LDHREVKENVVQMVRLGRKVIRVILEFQVSWGPQGTLGHQGQMELQELLDHQESKGHLGKKALLAPKAHLDYPESQEKKAKRAEMESRVPLESRAKQESQVYQDQRVPEAHLASRDTQAILVHPVPGESLVPWGFLVRKGYQEKMVTLDPLGHRVPKDQGAHRARMDHRDLQESLALQEPLARKEAKGKMAAQDFLASWVPVGLRENQERKESQARRGSLGSLESLDSKEKGEILGSKVTKDLLVEKASLGTLESQATKATQA

SEQ ID NO: 1188 - protein, 86 aa, Homo sapiens
LLPSTAGSVPWPSAEVKASPAERQHWFPPLQTIPPHPTAQCQRTRTLSWCSFAAMSMTSATGASLRTPSSLLMPMLGLPMGKWGSG

SEQ ID NO: 1189 - protein, 115 aa, Homo sapiens
RGSRGPRPTSWCFQKEETHLLLQNRWSMLFGLTRREEAHCPWKRQILRWRGGWRRLPRAAFRPPSLHGTRTWRCIVWSKPPPRTPVIKYIIGASLWDLTKGSLLKETHTCLKPIR

SEQ ID NO: 1190 - protein, 50 aa, Homo sapiens
VPAPICLGEAHGPQQTSAAAPPASPSGPRGVPGLCTDGSSRLRDAPSADN

SEQ ID NO: 1191 - protein, 42 aa, Homo sapiens
TKEVLLLQEQTKKPPFKGLMASQSAVLSTRKMVLTLGSGVLC

SEQ ID NO: 1192 - protein, 58 aa, Homo sapiens
TQRARCRSWCSPRRSTRERTPSSCLPKPSSRTAAMGWSKLSSSSTTTWASSCPRRMPQ

SEQ ID NO: 1193 - protein, 41 aa, Homo sapiens
LKSSSMPSSVPPQNSPLNFEVCATVYTRWLASVSLRTASVQ

SEQ ID NO: 1194 - protein, 22 aa, Homo sapiens
KKKRKTKNQWLASVSLRTASVQ

SEQ ID NO: 1195 - protein, 65 aa, Homo sapiens
SACAWRRKVRTAIHRQGPQGRVTSCLPPPLGTTSRPAVWTWAVPGSGMHTRRTLRASWTSTYSVC

SEQ ID NO: 1196 - protein, 44 aa, Homo sapiens
AASRPPCPLRPPTTAPPPAHPSACPWALSSSPLGATACPAPPPW

SEQ ID NO: 1197 - protein, 19 aa, Homo sapiens
WALSSSPLGATACPAPPPW

SEQ ID NO: 1198 - protein, 42 aa, Homo sapiens
QWCLPSHCRRPRQCPPSHNPHPLQLPSPYRATHPSSRPPHSL

SEQ ID NO: 1199 - protein, 111 aa, Homo sapiens
RLWRWHSHGFSISRQNYHSNSSAARGRQTAYDEGEMVEGQWLPRRGEQRGQCPGGSEYWWHLHCSGSRLGAFSFCGSGRIFIQIQKKRSIGKGIFYLVSATIPSRHCLVIF

SEQ ID NO: 1200 - protein, 32 aa, Homo sapiens
WKITLGRTGWGTGKIRGATPCTKTKRVTRTLA

SEQ ID NO: 1201 - protein, 52 aa, Homo sapiens
PRVTLPSFSQASTPKRRTNWSSKKRKKKARERGTAPRGERATPVRRKHCQMP

SEQ ID NO: 1202 - protein, 38 aa, Homo sapiens
HPRPPPAMPWPSAPIPRSASHAAATATSLCGICTTRPW

SEQ ID NO: 1203 - protein, 37 aa, Homo sapiens
RPRPPPATPWPSAPIPRSASHAAATATSLCGICTTRH

SEQ ID NO: 1204 - protein, 88 aa, Homo sapiens
NLPLPWAWGPWGKAPAQCHPGRWGLQPPQPRWGSGRRTQRAVVRSHQTAVMERCPQLWPRLRKSPWGTSSRPNPPPVLPRGPLRRQGL

SEQ ID NO: 1205 - protein, 26 aa, Homo sapiens
NTSQKRIEKMLRNFSAVPWKNTNSPR

SEQ ID NO: 1206 - protein, 54 aa, Homo sapiens
HPPSLPPGGHPSHLDLPVPQWSGHQLCLGAPRPTSAVSGRPPPRCHARCLIPRE

SEQ ID NO: 1207 - protein, 89 aa, Homo sapiens
IQQWCRAPRAQETLGGQSSQQVYTASRIRVSQQGDPTTSCSTPQAWKTQSFWSQPSWSSPTRVCVSKSPCSEWAWKGLRGGISFSSIRF

SEQ ID NO: 1208 - protein, 107 aa, Homo sapiens
PEYSPVPGTDAGGAAAGDPARQGERAAAGHDGPPAHAALGAQALQPATEPGPRLLLILQGDRLCSRLIPRWSRAPPDLGRSPCHPSTAPWPGLCLPAWWGPSPSEKQ

SEQ ID NO: 1209 - protein, 95 aa, Homo sapiens
PEYSPVPGTDAGGAAAGDPARQGERAAAGHDGPPAHAALGAQALQPASDRLCSRLIPRWSRAPPDLGRSPCHPSTAPWPGLCLPAWWGPSPSEKQ

SEQ ID NO: 1210 - protein, 61 aa, Homo sapiens
ERRKKENRSRKRGNIYIFKFGKILSSVVLLIPDKRSLTKTRLPSCFQIFYFSTCDKPTDKA

SEQ ID NO: 1211 - protein, 87 aa, Homo sapiens
KKPCRNAKRMGGWNRSLGKGSVAPSSSVFPIIPAQEFCFRRKSQMILEMRMKMKMSHQKKTLRMKSRHLREGCRRKPQPSPQGRPHL

SEQ ID NO: 1212 - protein, 16 aa, Homo sapiens
KKESHDCGGVSPFGKQ

SEQ ID NO: 1213 - protein, 174 aa, Homo sapiens
AVLGPGAPARLIPLLVAHGCLEADAQPALGSPRFLLPYPLHMAVVLGTPANHIMLQGRPLQDPSMGSWNPCMAVCRHCSGSQPSQGFGNSLGNCTSQSTIVRRPHAATTAPFDTEEASLSWGPALADCSRPSSGTFILAPASTEPRSCPHWSKCGTCYTLSTNGTMEPSGEVPR

SEQ ID NO: 1214 - protein, 80 aa, Homo sapiens
STTSSLGGGPNAKRKQLRRLPVPTMRRCAWMSTRFFIKILNKMGPNIDPCGTLLETSPQLDGLPITISLCIRWTPMRTSY

SEQ ID NO: 1215 - protein, 12 aa, Homo sapiens
LCHFPTCSVHGG

SEQ ID NO: 1216 - protein, 73 aa, Homo sapiens
KNVLFLPCQQSHHVKQKSQPRLLQNYLHLWQGNQVSCLCTNFYHHKTGCNPKSMLVLHRGMICHGCIVLKGHL

SEQ ID NO: 1217 - protein, 66 aa, Homo sapiens
STAPLPLPHHPQGGVPTHPPHLCLCTAAKPPPTTERNPCHRRLDKGFTLVERDLLLHPQSNHLLPL

SEQ ID NO: 1218 - protein, 136 aa, Homo sapiens
IQWSSCGTLQRGHLCLFSPKVQTESKKRIGKKWRNEHLMKRRNISLPMRQPYSQSVLHGPRSRMSITPHHLASTVPIAVFLLGKEMVHQTTSQSHPLQSQITSYQQPHLRKLSSGCIEIVFLHSQGFSQTSQGQIY

SEQ ID NO: 1219 - protein, 144 aa, Homo sapiens
IPSRRMKTGNILSTYTRPAARSKFSSPKVQTESKKRIGKKWRNEHLMKRRNISLPMRQPYSQSVLHGPRSRMSITPHHLASTVPIAVFLLGKEMVHQTTSQSHPLQSQITSYQQPHLRKLSSGCIEIVFLHSQGFSQTSQGQIY

SEQ ID NO: 1220 - protein, 106 aa, Homo sapiens
FLWQSVLHPRHPFWQPLPQPADYNVSTATAELQAANGWHIWPSCQAARRGDVQRAIQHWAGAASAAAVAPSPAPACQPATSCPAFPSARCIQPVWQCLSCHCHSCY

SEQ ID NO: 1221 - protein, 51 aa, Homo sapiens
WVAIRQAFHLCRAQLMALLAWAACSHFTLGGLHPTIFRQVCLASRASHHRV

SEQ ID NO: 1222 - protein, 80 aa, Homo sapiens
HLSVHGCTSINGQKDLGTDAACVAQSHGICTEDAITSFSTVPREKKYDLGRSTCRTTFPDPYSCLDQSKPKCVHLPRTLG

SEQ ID NO: 1223 - protein, 35 aa, Homo sapiens
FAPGNRKRKLCQSTVGSIKKNRSYLCNESCEKRAC

SEQ ID NO: 1224 - protein, 23 aa, Homo sapiens
AKNKFFLICNFIYLYLCCQLAPN

SEQ ID NO: 1225 - protein, 95 aa, Homo sapiens
LNSFCFRNVVLQHQVVSLFSQLHRFLPLIMQELLALRWSIRWPVTKPQVLECRGKLQLSSYWLGSKMFSWSQVQCHPQGEYKLCPFRTYKYCQVH

SEQ ID NO: 1226 - protein, 100 aa, Homo sapiens
KRRLLLQRRQKHQKRRPLHLFPQLLLPHPLYQLLPLHLRHPLCHLCLQYQLFHSNHLCLLLSQHLVRFLLPVLQLCPLLLTQRHLLCPLRQILSPLYRFL

SEQ ID NO: 1227 - protein, 146 aa, Homo sapiens
QRQEKKASPRSLQGRGTGMGRRAWQPMIPAGRTLGSPSPSLCLSSSRCCQTCSQHEGLHSRQKVQSHHRLRPAALPGKTGENGMLRRWSLTWGVPGRNAGRPLPPPATCCWIVPLSLSTCPRKRPSSSVQRSSSCQEPVIPVFHLG

SEQ ID NO: 1228 - protein, 56 aa, Homo sapiens
QGAILLPAAHPGPAPGPGHAALSGPWLLPVSPGHSRLPGPLCRHLSLQGLSAVEDP

SEQ ID NO: 1229 - protein, 74 aa, Homo sapiens
PPHGNGSNFELSSQCIRVHEQPRGSEQPGAVAFLPTCVPSSLQHPGGPISLSCWLSCRKQPVSIWPNLSCKYPR

SEQ ID NO: 1230 - protein, 39 aa, Homo sapiens
AKQGEKNQRGGIRGHQTRKTPQKRGKNLICSFSVGQSCR

SEQ ID NO: 1231 - protein, 71 aa, Homo sapiens
RRFLVRRASRPWAPSRGGRGAAREAGASRGRAPTRSPATTSETEISARSTKLPARVMWRKCSRSFCSGRMA

SEQ ID NO: 1232 - protein, 53 aa, Homo sapiens
CYWNQHLSSGSPGYFTPAQEHWTNSWSHWHWCSYYHFLHCTNFRGILLLEKQK

SEQ ID NO: 1233 - protein, 82 aa, Homo sapiens
LRGRHSSTNLPLGEVRQYPQTTSNSYSGPGPGNSHHPEHQCPVFSPAQEHWTNSWSHWHWCSYYHFLHCTNFRGILLLEKQK

SEQ ID NO: 1234 - protein, 125 aa, Homo sapiens
TLSAIKPQVTMGKELLYSQGRLTAPTSSHGTRNTPVLRRRKTSSAVPPTGRSAMTCPRWSAMQNQSRIGKLWMAVRRKQRRSIFSLIFVTECCRKARHEGVPRTRQCVQWIKMEVKIWENLFPLP

SEQ ID NO: 1235 - protein, 29 aa, Homo sapiens
KKFISLSVDYIGYTGKMSCWATKGHNEIR

SEQ ID NO: 1236 - protein, 72 aa, Homo sapiens
CGGSQVPISFSRTPQVCLALLSAGSWAAFVEASSSLTGTTMATPSWVWCMAPTIPSFCWPSGTRSSLGACPT

SEQ ID NO: 1237 - protein, 40 aa, Homo sapiens
VFLPPLYSWLHMLKTKELMSTRQLFCYLLWLSLICLLGLL

SEQ ID NO: 1238 - protein, 14 aa, Homo sapiens
RTFFCYLPEIIRIQ

SEQ ID NO: 1239 - protein, 54 aa, Homo sapiens
CLAQCQLPQCRHGWRHKPHGCRRSNAWTAWHPTLWHTPSREDESRLHGQPALWP

SEQ ID NO: 1240 - protein, 173 aa, Homo sapiens
TVCGVVCHPVRAEACHHHSVEVQEAQEVLGDPWVAWEAVEEIEEASLQEDPGVPEGTPLEEETSSTELETGSVPIRVVETRTSPGEQSATSVRPQSLKASSRHPFRPRVVIVAEVALVACGEEEVASWIVVVPVECSEVAVVETEVASVVAGAWTEVALVEEDEVALGGPLDL

SEQ ID NO: 1241 - protein, 24 aa, Homo sapiens
MEHRHQCRYQKNDFQFPCGSLRLS

SEQ ID NO: 1242 - protein, 105 aa, Homo sapiens
LATNAPTRVRSPISATFAENVSPATPTSTGTRERTLGRSPTSALSVGRSLLTVPTSFGTREFTLESDLISVPSVGKVSLGVHTSSFTKELMRERDFTPSLSVGKL

SEQ ID NO: 1243 - protein, 45 aa, Homo sapiens
MKRSTALLRLLCSWLLTPSRPSMVTTTPVFTSGDFWPKRNCFQKG

SEQ ID NO: 1244 - protein, 63 aa, Homo sapiens
HGQYATSGWVRDVSPTRGHEPENPRNCCRHACCCQLYPKQAARLPQYESRGHDGNWTSLWTRD

SEQ ID NO: 1245 - protein, 33 aa, Homo sapiens
DTSLKRNLLKLWDRVVSKLDHSDTNLEFACITE

SEQ ID NO: 1246 - protein, 49 aa, Homo sapiens
HQMLVTMNLIIIDILTPLTLIQRMNLLMKISIHKLQKSEFFFIKRDKTP

SEQ ID NO: 1247 - protein, 20 aa, Homo sapiens
DFTSRVPPRDLQGPPGHPEQ

SEQ ID NO: 1248 - protein, 36 aa, Homo sapiens
GDCCKAQKNHSPGSDPFPYPEECDSDPQVYDTSTHC

SEQ ID NO: 1249 - protein, 36 aa, Homo sapiens
GDCCKAQKNRSPGSDPFPYPEECDCHPQVCDTSTHC

SEQ ID NO: 1250 - protein, 66 aa, Homo sapiens
RRYFKTEKNGDYVSIYCNFRGECSPGSHFAKRLCTVRKSMGNPPRGFTDRFSKTGRSAEPHSGRDT

SEQ ID NO: 1251 - protein, 24 aa, Homo sapiens
HLMDFQRLKIFLNDTKKFILKIKI

SEQ ID NO: 1252 - protein, 22 aa, Homo sapiens
INVENMTFYVQQDTLVEWCGIL

SEQ ID NO: 1253 - protein, 18 aa, Homo sapiens
QTPDYEEGRHPDQKPKNV

SEQ ID NO: 1254 - protein, 70 aa, Homo sapiens
NHMNVRSVGKALVVFQTLFSIRKLIPVRNPLYVRSVGRPLDIITSLLNITEFILVRNPLNVKNAERPLVF

SEQ ID NO: 1255 - protein, 357 aa, Homo sapiens
EFMLEKNPLLVMNVERPSFRVHTLFTIIEFILERDPINVKNVVKPSVKIQPLFYTRESILERNHMNVMNVGRPLGLVHSLFSIREFILKKDTMNAMSVAKPSSIAQALLDTRKFILEKNHICVMNVGRASGRVLSLSGIREFIQGTNPMNVMNVGKLLARTQRLLDILEFILVRSPMYVRNVGRPSGGTQNFLDMREFTLERNPMNALSVERLSGGPLTLLSTREFILERNPINVMSVQEPFGIILSCFSTRKFILERNLMNVASVRKHLASIPNLSYIREFTLERSLMSAKNVRRLLVGALTSSDIKVFTVWSNLQNRKAFSGKAKVQLIHLFIICKYAPQVFKSNEWTEPPLSSH

SEQ ID NO: 1256 - protein, 196 aa, Homo sapiens
DISKFTVVGIPMSAKSVGRLLREAQTLSCTRESTVGGSHIYAINVGRLSVKAQILLYITEFTLERNPMNVMTVDRCSVKVHTLSHIREFTLERNPSNVMNVKKPSGSILTLLNTRDSTVERNPMNVTDVGRPSVGAQLFLNIRDCMLERKLKNVRKPSARMRSLGKSREFTRKRKLIGVISVVGISRAPQTSSDIR

SEQ ID NO: 1257 - protein, 62 aa, Homo sapiens
KNPPEGANCLSEERVYSAILLHTVPHWIYSSTCPPTASSHQENLFKLLKRHFKSKGCDQCPV

SEQ ID NO: 1258 - protein, 26 aa, Homo sapiens
KNSPEGANCLSEERICSTFLLHTMHH

SEQ ID NO: 1259 - protein, 17 aa, Homo sapiens
RRISKKEKQRKKKNVSE

SEQ ID NO: 1260 - protein, 55 aa, Homo sapiens
KFLRLKKWKYLKNQKLHLKGLRYLRKSSLQKNRPLKLFLEKSHQLKYRRCLRKLW

SEQ ID NO: 1261 - protein, 16 aa, Homo sapiens
KTEKTITDRYALVTCR

SEQ ID NO: 1262 - protein, 54 aa, Homo sapiens
VSLRGLSCARATLSFWPGGYPAYSKDSGLLTSSSREWKVKFPELLCVWVSSIRH

SEQ ID NO: 1263 - protein, 21 aa, Homo sapiens
KKKGELSLEPWIPYLHQQKTQ

SEQ ID NO: 1264 - protein, 20 aa, Homo sapiens
IRTKKENLKGESLCQNKEVK

SEQ ID NO: 1265 - protein, 33 aa, Homo sapiens
TCIIFGLFKAISPKKESFGFGKENRISNFSGVW

SEQ ID NO: 1266 - protein, 218 aa, Homo sapiens
DLLHRQRGTLRHLFPHPQADHPHLRGPQPPGVGHHERGHHLPALPGPAERRPAQAGRQHGSLSSPALLHARLRTPDQPGQPAVPGPDGARAHPADVRCQEHDGGVRPAPRPLPDRGRRVPGPHVHEGGGRADAERAEQEQQLLRGVDPQQREDGRVRHPAPRPEDGRDLHRQQHGHPGAVQAHLRAVHGHVPAQGLLALVHGRGHGRDGVHRGREQHE

SEQ ID NO: 1267 - protein, 105 aa, Homo sapiens
PAQAGRQHGALPAPALLHARLRPPHSPGQPAVPGPDRARAHPADVRCQEHDGRLRPAPRPLPDGGHRVPGPHVHEGGGRADAGHPEQEQQLLRGVDPQQREGGRV

SEQ ID NO: 1268 - protein, 313 aa, Homo sapiens
HLLPHPEADHPHLRGPQPPGVGHHERGHHLPALPGPAERRPAQAGGEHGALPSPALLHARLRAPDQPGQPAVPGAHGARAHPADVRLQEHDGRLRPAPRPLPDGGCHLPGPHVHEGGGRADAQRAEQEQQLLRGVDPQQREDGRVRHPAPRPEDVGHLHRQQHGHPGAVQAHLRAVHGHVPAQGLPALVHGRGHGRDGVHRGREQHERPGVRVPAVPGRHGRRTRGVRGGGGRGRGVDAPARRVRESGGGKRGGGGLPGTITWQWKERSMVYFRCALGLWCSSLLPVTFFFLFCNIDDINVTFEIFLNYCCNG

SEQ ID NO: 1269 - protein, 24 aa, Homo sapiens
KNLKGIEQSSYYSQTICSSKTCIK

SEQ ID NO: 1270 - protein, 79 aa, Homo sapiens
SPALTSQTLTPRALNACIPSSWRRVSWSTCSLRTYLTLRTILRCPAPMTTSRSKLVQKFWGLSVERKPQNPSAPRATVS

SEQ ID NO: 1271 - protein, 46 aa, Homo sapiens
LPRTTITTSMRIPLPMVGSTQSRPLQRGESHLLPRLPGCNLACCSG

SEQ ID NO: 1272 - protein, 96 aa, Homo sapiens
TRTRSRPPAPEPSSTSADSGRISNRTLLSSTGKQLLRVRTRHHCRNVQAEPIRTTITTSMRIPLPMVGSTQSRPLQRGESHLLPRLPGCNLACCSG

SEQ ID NO: 1273 - protein, 83 aa, Homo sapiens
SRPLPLLCSCSCWAWPGPRGATAGVRTRHHCRNVQAEPIRTTITTSMRIPLPMVGSTQSRPLQRGESHLLPRLPGCNLACCSG

SEQ ID NO: 1274 - protein, 151 aa, Homo sapiens
LTRPQANQPARCHGEASLFQVCRKWTLCLRLEASAQLCQGRHQGKPGAASPGNPQVPGTEASPPQGITLQEPSSGSRPRCPACSGRRSSAFCICSSRRAQTQGARQRRGARDTGFTQPHCQGRVFPHQVGLPHSWLPLESRLTFPSTRVST

SEQ ID NO: 1275 - protein, 223 aa, Homo sapiens
RYHLLPSVVFTQDRKPTRVMNVKKPSMIAPVLNFINRYTWERSLQRVVHMRRTPVIAQVFLFNKVFVLGKNAIGVMNVVKVSVRAQICKLIRESTQGRNPIHATSVVRALIRAHIFMLICLFTQERSPIDVTVVGRASVVAQILTFIAEFTLERNLINVRCVGRASLRDHIFRPMKEFTLERNHINVGIVVNALVVAQIFIPIRESTLKKNHTNVMSVVSALV

SEQ ID NO: 1276 - protein, 205 aa, Homo sapiens
ERNPIHVVSVEGASVIAQGFPFIRMFIQEKNASVKAHICELIREFTQERNSIDVMNLVIASIRALFILINLIIQERSLIDATVAARDSVAARVLSFITELILERNPINARNVVNALVKVQIFSAIRESTLKKNHTNAKSVVRASVGVLISVFTRGSTGVRSPINVRNVVRASLRLHIFTSIRESTLERNPTSVMCVVRASATIHH

SEQ ID NO: 1277 - protein, 48 aa, Homo sapiens
MPLLLRLGMIKIKPILMRLHRLIRQSVTPPPETRETLKWKAPQEVPEM

SEQ ID NO: 1278 - protein, 47 aa, Homo sapiens
HLFLTVSHPTVTQKKFILEVQLKETVVTHLLEYSTLLVISSYPSWLW

SEQ ID NO: 1279 - protein, 18 aa, Homo sapiens
IVLVLKKIEVWRENAELV

SEQ ID NO: 1280 - protein, 14 aa, Homo sapiens
KKFGLCRQHFEKIK

SEQ ID NO: 1281 - protein, 57 aa, Homo sapiens
KYSSVPCGNHQCYRGTLFLFPRLLRANKSDISSGHLFLYKRQHGFHNNAWLLWHYKD

SEQ ID NO: 1282 - protein, 92 aa, Homo sapiens
YLVFWAQLLPVGAQASLPWGMAAPARPPAASLSPLRCQLSPLAPQRRGQLWGLGSRTIPSSKPLVTSLAGTQAAFCPPRQIFHRRTKLLLKL

SEQ ID NO: 1283 - protein, 124 aa, Homo sapiens
AACVSASFRMWSQEFPSSPMGQAPGTWSSSGGPWTSPPHSSSRRLASPLAPLSVIPSTSQTMARSSSQSQTTRFSPTPTHSQQASQAGTLWPWWLRSGTMLTSPLVGGPHFIRNTRRSMVNTAC

SEQ ID NO: 1284 - protein, 155 aa, Homo sapiens
RQTVGDAQPHHHPPQPPRPSFPPFPALPCTPAPQLPPSPSCLREEFPSSPMGQAPGTWSSSGGPWTSPPHSSSRRLASPLAPLSVIPSTSQTMARSSSQSQTTRFSPTPTHSQQASQAGTLWPWWLRSGTMLTSPLVGGPHFIRNTRRSMVNTAC

SEQ ID NO: 1285 - protein, 155 aa, Homo sapiens
RQTVGDAQPHHHPPQPPRPSFPPFPALPCTPAPQLPPSPSCLREEFPSSPMGQTPGTWSSSGGPWTSPPHSSSRRLASPLAPLSVIPSTSQTMARSSSQSQTTRFSPTPTHSQQASQAGTLWPWWLRSGTMLTSPLVGGPHFIRNTRRSMVNTAC

SEQ ID NO: 1286 - protein, 66 aa, Homo sapiens
QAAGVSCSSWLQACKKARMSTSTPAWQRSYSWAQTSFPSTSKRHQRLPLTSSYIIVFLRPRGIGSS

SEQ ID NO: 1287 - protein, 140 aa, Homo sapiens
GHHEPPSGTLCYCGTQHFSPPPGPGSGPPAGPAACTDPGPCPSPDAAAPSGYPATPGTVPPSEPPAASGPGPPSAHGPNPGLGPPSGPGSPGSPAPPQSLAAWRPEDARLRCPPECDRVYLNYPPFNGGHSAAQPASGPE

SEQ ID NO: 1288 - protein, 137 aa, Homo sapiens
EPPSGTLCYCGTQHFSPPPGPGSGPPAGPAACTDPGPCPSPDAAAPSGYPATPGTVPPSEPPAASGPGPPSAHGPNPGLGPPSGPGSPGSPAPPQSLAAWRPEDARLRCPPECDRVYLNYPPFNGGHSAAQPASGPE

SEQ ID NO: 1289 - protein, 36 aa, Homo sapiens
SQKKTNKITVTRKTPQVIIWIIPFWFPFKFKKEIMY

SEQ ID NO: 1290 - protein, 125 aa, Homo sapiens
HYQPQPHQGQAPRCQNRPIRNCQEQRPPRRQAHVQPQQAPQAQPPHSQDNPRGPQPQRPLKQERLLNTQRPKPHTPHTPRLRRGVPSLPQVLSLQHLSMPPLPIQPHHTLRPHFPLTFHLSPPPW

SEQ ID NO: 1291 - protein, 119 aa, Homo sapiens
PPVGPANPEAHLARPKPLHPYIHTLPPHTILKSPQLLPPASPPTTPVQAPEPLWPTPRRPPAAGYPHPSPHTPHLQGPLPSLPQVLSLQHPSRPPLPIQPHHTLTPHFPLTFHLSPPPW

SEQ ID NO: 1292 - protein, 32 aa, Homo sapiens
LQHPSRPPLPIQPHHTLRPHFPLTFHLSPPPW

SEQ ID NO: 1293 - protein, 32 aa, Homo sapiens
RQHPSRPPLPIQPHHTLRPHFPLTFHLSPPLW

SEQ ID NO: 1294 - protein, 15 aa, Homo sapiens
KKNKFSGTYTRNTKQ

SEQ ID NO: 1295 - protein, 48 aa, Homo sapiens
FVLWRSNRTDVFDAWMCPSNIQQILAPLCSIFLHPFTYSILHSKKISG

SEQ ID NO: 1296 - protein, 242 aa, Homo sapiens
TRRCPGPPAAPCISQSFWTAGTETVSWMPLLRPCPSPQASRAAWPCTSWTSSAGRSLGRISATAPTPLLRTSAPSFGATLMGLSPCATRRMAACPGLTARRAGLGTSAQKAAVYLRRKWRGPSPWQMEAGHRGDPGENVLGPVEEEYSFHTVSARTPSLRMEEDTAWVGEPSTSHATRRNAPLTGKASGSSSVRSIMPTITLTWTGISCSGSPSMLGCPPGTAASCSAEPGGGASSKCSRPR

SEQ ID NO: 1297 - protein, 113 aa, Homo sapiens
AQAQPAARAADLAHVHRCQVPDLEVRGHLHRQLLPVPGLVYGDVPLGTLQQLLLCCPSPGHRHGGQDAAHHPVLCHPQWETAGDDRGPSGGGRLPVHRGGLQLLPQVLQQERG

SEQ ID NO: 1298 - protein, 48 aa, Homo sapiens
YLGMPGASPVGGPLRHLQASQASLCLLQLGFTWGVGGTQMPMVTCAYN

SEQ ID NO: 1299 - protein, 26 aa, Homo sapiens
RKNRPPRIRLQLLGLVLLAWPVPSVS

SEQ ID NO: 1300 - protein, 52 aa, Homo sapiens
GSITTQLCGRILRSTTPSALTQRTARGGHLWLLFLSPQGPGTASGRRSPWRR

SEQ ID NO: 1301 - protein, 92 aa, Homo sapiens
RRACGCIPQSRSSPAMSPRTLCSQTAGSSPKALSASSVFSEPITTQLCGRTLRSTTPFALTQRTSRRGHLWLLFPSRQGPGTASGRRSRWRR

SEQ ID NO: 1302 - protein, 88 aa, Homo sapiens
GCIPQSLPSLAAAPKTLCSQTAGSSPKALSASSVFLEPITTQPCGRTLRSMTPFALTQRTSRRGHLWLLFPSQQGPGTASGRRSRWRR

SEQ ID NO: 1303 - protein, 87 aa, Homo sapiens
KLENGVVQTNQILALEHGTIKRATPSLKTKAMPRLPVGEDLPAPQEVKLEVKALEATTKQEVVTVITLAVGRTGPHILIVRLSCRLF

SEQ ID NO: 1304 - protein, 92 aa, Homo sapiens
INTPPSAVPKNPFLLPKKKFLIHLRKVDTHHLQVVTKTVTATTADGQRMRRLKCKACRLRWARPEPAAQAPPKSHFPPHPSGPSRTSSLQLR

SEQ ID NO: 1305 - protein, 53 aa, Homo sapiens
VHGLQGPAPRGTPGTLPERLPRRPLGNRFCGHRNQSVSPVFSGQLAGRTATNT

SEQ ID NO: 1306 - protein, 116 aa, Homo sapiens
PRDSLETMNRIQASCIHGWSMSRGTSSPCRSRILPGASRSKTASPRSSIPCPNACSGPRVFCWSIPSQTMTATCPSDPFISTSGRSTLTLKPLSSSWATRGTFCMPGRCRHRTVFS

SEQ ID NO: 1307 - protein, 140 aa, Homo sapiens
EHIREFTQVENPMNVVTVRKLLPIIQPSKYIREFTRGRNPMNVMNVRKHLPIIQPLEHIRISTQGRNSMNVVNVEKLFSRRHASVHIGEFTQGRNPMNVASVGKLSPRNHTSVDMREFTQGKNRMNVTYVGKLLSIRQPS

SEQ ID NO: 1308 - protein, 59 aa, Homo sapiens
SQTSQYIRERTQGRNPLHVLNVGNSLAISQPSLNIIEHTRGRNPMNVMNVEKSFTINHT

SEQ ID NO: 1309 - protein, 35 aa, Homo sapiens
QNIIEHIQGRNPMNVMNVEKPSARSHNSLSIREFT

SEQ ID NO: 1310 - protein, 83 aa, Homo sapiens
EHIKEFTQVRSPMNAVTVRKLLPIIQPSEHIIEFTRGRNLMNVMNVEGLLPIFLFSRHIKEFTQGRNPMNVMNVGDLSPTIQP

SEQ ID NO: 1311 - protein, 153 aa, Homo sapiens
NTMIVVKVGIISGGNCVCHSFRKVIKERNTLNVMNVGKLSGRSHISLDIRGCTQERNTFNVINVEKLSGRSQTSLNIRDHTQGRNLLNAMNVGKPLAISQPSHYTREHIQGRNPISVMHVGKLFTRNLTSLNIREHTQGRNPMNVMNVENPSV

SEQ ID NO: 1312 - protein, 72 aa, Homo sapiens
LWACRGSLTCVKKRRSFPWITLRSRKQNGRQNLRSPPSLSPWPLQPLPPNSSKWLGSRILGRRPPSGSSPHL

SEQ ID NO: 1313 - protein, 23 aa, Homo sapiens
TRPCRGSGRTPSTWRGCPASGSP

SEQ ID NO: 1314 - protein, 65 aa, Homo sapiens
KRFGPTVPPMVGSSTRWSLCSRTEAPSSGTWPSPLISATCTSCLRDRSPGSPWSHVSSIRLVGSA

SEQ ID NO: 1315 - protein, 41 aa, Homo sapiens
ERGRAWLCVPVPASQSRPHPQEEEATPPGSWRAGQRAVSAQ

SEQ ID NO: 1316 - protein, 40 aa, Homo sapiens
QHWSETKNCRFWSCSQVGIKRNWCRRVSGTITGDNCIYGT

SEQ ID NO: 1317 - protein, 34 aa, Homo sapiens
KISRTESYYQSDPLENGPHRKTESHFGRCVCWCC

SEQ ID NO: 1318 - protein, 70 aa, Homo sapiens
MESERDCQSNSTTDWWTTSQRHLVTWPPAVLPCKYHALWWLQNLPPPLLKHTITWLIHILLRSSLVNLPW

SEQ ID NO: 1319 - protein, 90 aa, Homo sapiens
TPFGEISALDPQAWTRGGGILPVRGGRTPGMPQMQILVHWESLLPNAGGSPELADPGLQLCVLQFHRGLHGHHQLGGHLLLSVRRGLQWL

SEQ ID NO: 1320 - protein, 33 aa, Homo sapiens
ARCTPPASTRGNPRAHRPHPPPPKPTCSRARLT

SEQ ID NO: 1321 - protein, 21 aa, Homo sapiens
CQEKKQNQHPSPNLYCGQNKK

SEQ ID NO: 1322 - protein, 63 aa, Homo sapiens
FRPTSLKSHSCLRSPSQPATSPRWCWKQTGPLQPLRATTQMVQRRRLVHAHKPHPTALPTNPS

SEQ ID NO: 1323 - protein, 57 aa, Homo sapiens
AGHWPPGRGGCVFTHTHTHTHTHTHRLSPQDRSCPETAAWLFFFRACLISNPFQSRN

SEQ ID NO: 1324 - protein, 339 aa, Homo sapiens
SRSSHCRANSSRQGPHPHWLLQGPEPPPGLPLPSHPQAATPACLPSSASSSSSHPRPGGTLSAATHRPKPSMLASSSPLVAPGLSLGPTGRAGRPGQMGPPAVAAAGFRGVGRWTRPWLRSWKPPGPKRKAQGQRWPPWAPLPSAPAAAGAPRRRRQCRCPGPRHRPQAAGSGTGPGAAGARVPPPARPWPLPSAHPVPWPGPHPPPSPCRETPAFTASRPHRYRPPRIPSRPQRPPLAPAPAPRPCAGPAAGISSTRPAFSSHMQYQSFTGAAGLQNAKCASAPEGPQYWSVPPICRFPFQTKGNPQIQQKTHTHTHTHTHTEQAIIYLFLIYFVIFL

SEQ ID NO: 1325 - protein, 93 aa, Homo sapiens
PQPQPPGRVLAQRLALALPALPSLLICNISHSQGRPVSKMQNALQPPRAPSIGRCPPSAVFLSKRKETHKSNRKHTHTHTHTHTQNRRLFICF

SEQ ID NO: 1326 - protein, 184 aa, Homo sapiens
QRYVRRVPSLHTLSCRHPALTPPIPPLTPSSSHGVGGLGVHSGPAHLSPFPFIQTLRLAISTAHSSTLPLRPVGRGQVSAGLACGKALELGTGPPDEVAVCSHTHTHTHTHTHTGSRPRIEAAQKLLPGFFSSELVLSQTPSSQGTRISNESWKPSHSFPQSEEAVVMSPSPTGFPTRRGLGPR

SEQ ID NO: 1327 - protein, 70 aa, Homo sapiens
GPETCIIEEDSYAGGTSYQLREEAATLVSTQSGSEIHHRVSQQTQIWWDVIPYILFFILHWGNKTRNTKC

SEQ ID NO: 1328 - protein, 103 aa, Homo sapiens
TSFFSSSWSCSSMPYLECIILPMLKKKLELMMCLILKPLATVCSVFFKLQYLLVGMGCLMQFSTVNGLTVILIKLTLGLKLEEIVGTPLLGFFILSVISSYHG

SEQ ID NO: 1329 - protein, 59 aa, Homo sapiens
AHNSSNIREFTLERNPTNVRYVVGPSNGSHILLYITEFIQVKSHMNVRNVGRLLVIAHN

SEQ ID NO: 1330 - protein, 111 aa, Homo sapiens
APHLRTIRKFILERSLLNATYVEKLLSEIYTLPIIIEYILERNLLNVTFVKKPLCAGHTLPNTRISTVERNPINAMNVEKPLIRVQVSFSIREFTLERNPLNVMNVGRPSG

SEQ ID NO: 1331 - protein, 111 aa, Homo sapiens
HILEMDLINVRYVGKALIIPVQCKDMKELTLERNPMNARNVVKPSVIQVTYEYTKEFILERSRINVRNVGNHSIVPVPFINMKGPTVWRNPISVKNVGKHFIVSVPFINMK

SEQ ID NO: 1332 - protein, 206 aa, Homo sapiens
STLAMDLINVRCVGKPLISPVHFESMKGPTLERNPMIVSNVGKPSVVPVRFENMKEFTLERNPINVQNVGKPSVVPVTSESMKELTLERNPMNVSNVGKPSVDPLTFEYMKKFILERNPMRTLTLTLQLSQFFHEHERSHIEKPHESKKFGKAFSPFCFFQLRERIHSGERPCKIIGFKLRETCDRTVKPRVGVGSLDCVMSVLVG

SEQ ID NO: 1333 - protein, 83 aa, Homo sapiens
SPTLETDLINVGTVGRCSFFLVRYEHMKELTLERNPMNVNNVEKPLVVLVTFGYIKELTLGRNLMNVRNAGRPLFIPQAFKDT

SEQ ID NO: 1334 - protein, 66 aa, Homo sapiens
IKKGKQCKSFQEQAMEGQRNSWLSSKLFYILQVEIKRLFRILVNMEENGLTGLKKWKIFRSWGIIP

SEQ ID NO: 1335 - protein, 55 aa, Homo sapiens
VSPVPNLLQLPQALPQVTLPQLKSGKYVQSVMSFFLKMSIVCTSKKNIKLRKSQQ

SEQ ID NO: 1336 - protein, 42 aa, Homo sapiens
AAWRVQIPECAISSLHQESTPSVNSNSCRGLKKPRKSGQQML

SEQ ID NO: 1337 - protein, 73 aa, Homo sapiens
RSCSFMLGKRLISHTWRVKWKKESTLSKRQRPKPGACCLGAHRCWMVPRGSLLPPSWWNPPKKVKGASLPHCL

SEQ ID NO: 1338 - protein, 43 aa, Homo sapiens
LFIILSKKDLISSNSRIISIQYLDLETSKKLSKKLKDSLKALN

SEQ ID NO: 1339 - protein, 46 aa, Homo sapiens
KKLIKLMKIIKNTVPKLAKIQEIILMKMKAKVKQVKNYSRTLYDQK

SEQ ID NO: 1340 - protein, 11 aa, Homo sapiens
KKQTISEISEN

SEQ ID NO: 1341 - protein, 116 aa, Homo sapiens
KSTRKFIILGRMMMRYHQAIQSHSFLLVQFHLPTITSNTVCRIICVKVMGCPWTLIRQMIIINWCFHCYLDSQMKWTLLLTYALSYQMKASTSCNLKKILKSSLYYLLMPGCLTTL

SEQ ID NO: 1342 - protein, 63 aa, Homo sapiens
LRIRKSSVTRMKMMMPKMKAKQKTPWMPLIKWYTSIAQCLAKRMQLKTLLPLQQVLALGPAPP

SEQ ID NO: 1343 - protein, 136 aa, Homo sapiens
GPVMSPLPGAGVIPAGTNGRLRQSMQSSLLCLPGRNFPMVARRPPNRARKLKAYEKDPCWDPAKRQPPSLLLLVFASSGRVRRSRRCTGSPQTPPRDANLPKTSRLSLSQAFLTLRRKWWPTQSSRPRRTARLQTG

SEQ ID NO: 1344 - protein, 51 aa, Homo sapiens
GQSKVVIKEFKISICPVCVYRSSFQKRNALSLTYLLTKKSLPNLKHCLMMS

SEQ ID NO: 1345 - protein, 49 aa, Homo sapiens
VRGQVPVRTRHPRAPQPDPPPQVQDGAVPHLPHHRLLPLRAPLPLHPQR

SEQ ID NO: 1346 - protein, 95 aa, Homo sapiens
AEGQPRGAASGRGCRVSAPAPRLLPVWPVPVRGPVPSQERHQGEHQHAEGLAQRAPQEPLPHQGREDHAGHHHQDDPHPGVHLVRQRAPAPQEGE

SEQ ID NO: 1347 - protein, 187 aa, Homo sapiens
VLPAGLPVPGARLAGALLVPGLRRVGFGGSAQRGAGALGVGLGVQPLPGLGGLHGAGGHRLREPAAVLGRRRRRRRRLPVLHGRTLRRAHHRHDRRHQLPPVRQRGLPVPAQRPRVPQERHAGRHGHSQGLAQRAPQEPLPHQGREDHASHHHQDDPHPGLHLVRQRAPAPQEGEQDDLGPEKQKRR

SEQ ID NO: 1348 - protein, 53 aa, Homo sapiens
CQKLREGGDQTELLFSVLGEEQLLAILAHMNGERISRRFFRKMLWLILASTVP

SEQ ID NO: 1349 - protein, 64 aa, Homo sapiens
EIDFLRSSKQVLPLMVSISFLGKRRVLLLWKLEKLLKLKKRASISKPKHVKKYRMAYLILQRNS

SEQ ID NO: 1350 - protein, 68 aa, Homo sapiens
NPSFNETSFHCSLKSWHSMCFHSWNPKTCYKQLRHVATGEFWLKTTFSGERNAKKRGLMNHCTSREEK

SEQ ID NO: 1351 - protein, 107 aa, Homo sapiens
FILERNHTNVRFATRLLSMIHTWQNILEFTGETNITHVMNVARFLIKKQPLHVIIEVILERNLISVMSVARPLVRHHTLCTIIDCILERNLTNVMSVARPSLEIQSS

SEQ ID NO: 1352 - protein, 298 aa, Homo sapiens
LSIREFILVRNLMSVRNVEKPLFVVQILLNIRMFMLVGNLINVRNVGKPIFGAHTLLDISEFILAGNLMNVSNAGRLLLGLRILLNMRKFTMRGNPMNVRNVERPFFMAQSLIDIRKFILVRETMNVRNVERPFFVVQNLIDTRKFILERGHMNVKNVEKPFSGVHNLLDIRECILVRNLTYVKNVGNLLSGVHSLHDIRKFILMQNLMDARKVATSLVTIHILLNKKFIIVQISVNGQTMGTPLVMSQTLLNTRIFTLLRNPMNLKILRKHFLQALTSFHSCEILYKSVGRALFMTH

SEQ ID NO: 1353 - protein, 136 aa, Homo sapiens
VKRNHGNVRYVERPLIKTHNLSNIREFILVKNTMNLRSMGSPLVVAHSLLDIRGFTLVKNPMNVRNVARLLVVVHIFLNIRGFTLVRNPMNVRNVEKPLSIAQTLMIIREFTLVRNPMNVKYVEKPLLKVHNFFYI

SEQ ID NO: 1354 - protein, 95 aa, Homo sapiens
AHLFTVIKVRDFNLAKMPLSVVSVEKSSLRVQLLINIRKFIMKKMQIRKFILRRKDMNVENVGKPFTRVRTLSITKEFTLARNPMNVRNVARPSQ

SEQ ID NO: 1355 - protein, 280 aa, Homo sapiens
ELTPVRFPMNVRNVEKPSVVAIISLNTTEFILVRNPTYVTNVEKPFVFKENLPDITEFIHVRNPMNVRNVGRLLFIAINLFHTSEFTPVRAPTYVKNVGRFLVVAIILLNILKFILVKNPTYVMNVGKPFDFKQNLLSITEFILVKNPINVQNVGRPLFVALISRNITEFILVRNPTNVRNVGRRLVGTIILLNITEAILVRSPTYVMNVGMLLFAVIDLHYIKEFTLVSFHMNVRNVERPLVVGIILLNILDFILVRNLIAVKNVGMPFVFKQNLLDIT

SEQ ID NO: 1356 - protein, 59 aa, Homo sapiens
YMGNSVKLLTVRMTHSAWSFFWSQSLAFPSLKTTVSLCWRSSGLSLSIWNQWLSCPSSS

SEQ ID NO: 1357 - protein, 42 aa, Homo sapiens
ATWCLRTCCVRASSGTGRMPARATVGGPWSPPSTAPGSWWAW

SEQ ID NO: 1358 - protein, 131 aa, Homo sapiens
KAAVRHCRGPFFKVDSLWAICPPAAQWTPTQASASPRSWILGSAGASLARNPVSPTAPGRAQVAPRPPPPQPPPRRVRATDSPITSGVFSAGRRMRSWASCPPSHLCSMPTLIFLISSKTTQTGQAVANKS

SEQ ID NO: 1359 - protein, 159 aa, Homo sapiens
ASLPGAPGLRQEAQEEDVPAATYHRRLLLAARLAPLAGRHLHRGQLLRREPGPHLLGGVGRPLLLPQPPQGQRLRGAGPALLQPHDGRDADLRHREVHPVHPVLGVQPQRPRPRPDPAEEERGPLCHTLAVRAAHLPARARQHLPRRTQVPDCGLGPLG

SEQ ID NO: 1360 - protein, 108 aa, Homo sapiens
RSTRAHGHTPVPTAARPSCVWRGCGSTGARTAARSPSPAPSAERLSARARSSCSTSARTLVSGPSSAPSAARLSSWAPTWRSTGACTRARSLMRAPSAARPSASAPTY

SEQ ID NO: 1361 - protein, 336 aa, Homo sapiens
RLLSWRRPRVAAGQPRCRQLRARSLPQRQALPRERATEGGLPGRWGLLAFVKTRKPERGPEVPLEARSLLRKLEDRVASSQTSLRTQAPAQRAGAAGRGGLSRAAPVAAASSAPRTRQSTGASTRGRNRTSAATAGRPSSTARTWSGTSGRTAGRGPTRAPSAARPSARASTSSGTSACTRARSPTRAPTAARPSARGRTPPSTAAPTPGRGCTRAASAGSASCTARTWSGTGGPTTGRTRTSAGSAARPSARAPTSSSTSACTRGSGPSPARTAAAPSAAAPSSASTAASTPGRSPTSAATAGARSGRCRASSGTSDSTRARSRSAAPSAAAPSA

SEQ ID NO: 1362 - protein, 147 aa, Homo sapiens
ASPSRAQSWKETGNTRARLRTCRKTRKAVQSQRPWPARETLLGTACRNAMNSAESQEPYRALLLPKPVSPTTAVPGGAARLGRARRRGILTAASGREVEAPRSRGNAGTAGRPSATVQRSSYTRESTPGRSHLRAPSAARPSARACT

SEQ ID NO: 1363 - protein, 96 aa, Homo sapiens
PCALRRACGCIPQSRSSPDVARRTLCSQTAASSPKALSASSILSGSITTQLCGQTLRSTTPSVSTKRTSRRGHLWLLFPSRQGPETASGRRSPWLR

SEQ ID NO: 1364 - protein, 18 aa, Homo sapiens
DGTQALQWRRLYMYHLSA

SEQ ID NO: 1365 - protein, 102 aa, Homo sapiens
DSWGTWCPSRRTGSTPRCGSSSPQPASRTCTSTPGRRRSRARSWSTRCCCLEHSSRGRKAGAGRLRRDSSWWTSAAKPCSRTRIPAKSWVRRSWGLWYRTPK

SEQ ID NO: 1366 - protein, 116 aa, Homo sapiens
SRNCEEDLKQPIFTASTSIRMRPSSAYPATTAQCIFLQLKIQKGINSPVWPQPVSFQNTSVPSGVSPSFRFPQALRAFVPLEQSQTPSLQFVQTAATTNSCSTPRGSASEMSTRSF

SEQ ID NO: 1367 - protein, 31 aa, Homo sapiens
DSFTAWHGAAGPRGRVCIGTPSCSTAWGVSC

SEQ ID NO: 1368 - protein, 175 aa, Homo sapiens
RGGRPAHSPPSRSRRRLWTTLRSLRAPLPHQGARPRSPLWWTPPVTPASQLGSTNTWTGATTRVPGQTCTSCLWPGPSWPRRGRRPLRRPSARLSRKPERSESGRRRRRRSGSGSESGSARQSGRLRRPAQRMKVASVTHSSVVLATCGHPSSHHQPPLLLCPPTSGPTHLPFGL

SEQ ID NO: 1369 - protein, 34 aa, Homo sapiens
KVPMLRKQIAAPPRRIKTVPKKKVSLRIVQMMNL

SEQ ID NO: 1370 - protein, 23 aa, Homo sapiens
PRGLCTELLLRQRSWACTWRCCS

SEQ ID NO: 1371 - protein, 41 aa, Homo sapiens
WLRCRISSSWPRGRQGAAHPLGGPRSPGASWTACWGACSLT

SEQ ID NO: 1372 - protein, 89 aa, Homo sapiens
WLRCRISRAPGPWRRLYFLSPSAHLSRREKSTPIPVLPDTVPRASGVLTSPLRVHSSWPRGRQGAAHPLGGPRSPGASWTACWGACSLT

SEQ ID NO: 1373 - protein, 75 aa, Homo sapiens
WLRCRISRSRAWSKERMGSGAGRPAGLGTAGGAAPEGRTREGSWPRGRQGAAHPLGGPRSPGASWTACWGACSLT

SEQ ID NO: 1374 - protein, 139 aa, Homo sapiens
NTMIVVKVGIISGGNCVCHTFRKVIKERNTLNVMNVGKLSGRSHISLDIRGCTQDRNPFNVMNVKKLSGISQTSLNIKDHTQGRNLLNAMNVGKPLAISQPSHYTREHIQGRNPINVMRVGKLFARNLTSLNIREHTQG

SEQ ID NO: 1375 - protein, 55 aa, Homo sapiens
SQTSLNIREHTQGRSPMNVMHVGNPSATDQPSLCIREHTQGRNRLYVMNVENPSV

SEQ ID NO: 1376 - protein, 86 aa, Homo sapiens
PACSGCRNSPFSTPRPPPCPRGAPTPTATTRCQVQRRPGPPWRPTPPAWGSHTRRASPRRRARRGARPRGCRPHPPTTWTTPPIRT

SEQ ID NO: 1377 - protein, 39 aa, Homo sapiens
VAMTSEKWAFLQEKKLGLYYNSCENSGKKVVTKWKKMNF

SEQ ID NO: 1378 - protein, 227 aa, Homo sapiens
RAPRCLPAATLWWTPSLLWPCVRRLCVSVLGGWSAPALPSWSTPGPVPRREWCCTAGPTTARAAQCALLVWSIGSVCPLAPGPARACTSMKCVRSDAWMAAAALRDSSWMKASAWRAPSVPACIPESATLPAPPSLETATPAFAETASGSAAMKNVQGSALSQVNHTSRALTTDTSPSVGSASTCWPGIARTTPSPLSLRLSSVLMTATLCAPAPSPSGCLACTTAL

SEQ ID NO: 1379 - protein, 220 aa, Homo sapiens
GGGRGGAIPHCAGAAGGGPGPGQAAGCEDALGQAAARAPRAAGLFRGCSDTRVGLPGGGGPGARRPGAGAAEARERAREGGARSVRGDGAASGAEPAPAESELRPRGAEKPSGAGAAEPRAGPGTRGPAAAGVRAAAARPGCGAPGGTGPELPAVAGARGAANAAGGGAGADPQAGERSTRPPGANPTRRGRRLQEHAERESQPATATGAAQGAEYTAAG

SEQ ID NO: 1380 - protein, 261 aa, Homo sapiens
RWRRSTSTSWASSPFSAAATRAGATPCATTFRSTTASSRCCATPRGPGARTTTGCSTPTASTPSPTGSSAAAASASATARRSPRPGCGPRRPRASPPPRRPRPPPRPRPACARPPARRSAPAPRASSPAPSPSTASCASPSAAAASGTRPPGRRFSGAPRPARRCPRSPRSSPRRPAGPCCRSARTARASRRGWARARPRCHRPRRPSCLHLSRRRPPPSHSEARRPAARTCTAPCGCPQPCRRPQSAALARTCRTRWRRS

SEQ ID NO: 1381 - protein, 265 aa, Homo sapiens
TALRRSTSASPTPARTGAPASTSPTPTSAPAHGALRVCTVRSTWTTAIPPLTPCPGAPSALTTAPAWTRWAATAAPARRASWVSAVRGMSTSACPIPATPVAPRTACSASMTSTASAVLVTPGAAASPSSMAAKASPARMGAPAPWPPTPPAGSSASALRASRAPRVRMTLVPAAACAASTAAHASPARAAPPACAWAPSRAPNASSRPAAPAWAATPATTRGPVSPHPRAPSTVACAPPNSTGSCATSWTTASGVGPGATSPRR

SEQ ID NO: 1382 - protein, 392 aa, Homo sapiens
HLESPGGKLQESGHGGRRPRGSAGGVQAGPGGTANSGHAAARRGAPRRRHRRLPHDGGGGAPALALRRGGLLQRQPGQHERAAAVPGHHEEQRLWPRMVRRQPRPALPRHLPLHGPGERHEHERHGRPGLAGGREQEHGPAAKRAAQEAPGALLAGAGVRAGATLQATEVPVGAGARAPGQHDPPDAHAGQDLVPEPPLQNEAPGQGQGGAAATAAGQRRRRGRRGHRVPAAATGSAAVAATRGGAGPGERRQTVPGGCPRAGRRQPTRPRAAAGAAPGAGRAGGGSGHLRGQRWRRPWRTPGPPARQRRPVSGPGAPRRQPRGAAGPGIQPVPPELLGLGLRHHVLLHLAIRSDLVRGRRAGPSPALCLTASLLPATQTTIHRCSTRFDFS

SEQ ID NO: 1383 - protein, 97 aa, Homo sapiens
TGEAQEGPVEAVPGAAEAADAPGGRLCPVHHAEPAAPCQDAHPEAGGSGAAGPTAQGEAAQQAAEPAAAAGAAPGAGRGGRAGAAAGGQSGLLRPLL

SEQ ID NO: 1384 - protein, 38 aa, Homo sapiens
GAPPFWAGGRASRGPAAAGGFGAGVWAQPGACLLELGE

SEQ ID NO: 1385 - protein, 126 aa, Homo sapiens
DGPPGWGHPHHHPGVQFGRPSRGHPEDLCGRPELLLSAGTLLRVHPDRVCDRGCGDAFHGGCRGGRLRETGPFASQCPVHLPTAQASQCGAAAGTAGGRHHTDHPRHPPGHGLPGGRAGDPQRRPV

SEQ ID NO: 1386 - protein, 284 aa, Homo sapiens
EAFPAPPTDPGSPPAPPLPSTCCTRRPAQPPPRPSAWGPCPAAASPGGLPQHRPRETPLRSAAPASSSLPTALGPRLCRGTEESRRRGPGDPGTLPVLQPSLGPQPWEEGKGLASPPGGGCISFSIESIMQGVRGAGTGAAQSLSPTAWSYCPLLQRPSSLSDNFAATAAASGGGLRQRLRSHQGRGAGRAPVGRVGAAAVSGGGRGLWADIAGRPFGRRGDLTSFFSIAHAQFPGRVRRALLEPGGSGERPAAAHSTLRGPYWACASESRWRANTNFCSLQNG

SEQ ID NO: 1387 - protein, 143 aa, Homo sapiens
TSVSLCWRYVGPRSVRTWRAPSCASVPVTWRSTMPRRGTAAHGGLEVRVCLRPQRGTMPRPPPAWTATPGRRAMRPAPVSWAGTPHRLNAAAPRALAGEMPVTSARLRTQLNSARSALVEKATFLWKEPGRLDRPCTQMRMSV

SEQ ID NO: 1388 - protein, 113 aa, Homo sapiens
FRHGKKSLCPRPRAKAFRPSTSPEDARRTPSTWMPSSARSRAPSPGSPTRGPPWMTWAWWPRPAAAPSTGRGRSSMAPAGSARAPCPSTSSSPCGEKSSRTATTTRPSSSICS

SEQ ID NO: 1389 - protein, 201 aa, Homo sapiens
AGIWVAPARLMPTALPATPASLPSQGLPVAAPSQRPWHAGMAITAAHGASTAVQTGDPASKDQVTTPWVPSSALIVSSNARTSPRAVLWSMAPGGAAPCPRLPAVKTGCTAVRTVPSATWFTPAASHPRAPTPWQRSSLPRGLTGQWPCPARSCVRTHGPGALMVLPAVSCPVGSMAAAQCPTPPAAPITCTAAPKTLCVT

SEQ ID NO: 1390 - protein, 85 aa, Homo sapiens
SRFCGLCNPCGHCGLDINLRGGSSPWTDKHSCVHNNLLCNRRVFSLLCEGPGHCYQGAVCREACAAASPGLDSAAEPHRLCEHTD

SEQ ID NO: 1391 - protein, 122 aa, Homo sapiens
NQQPTNTKSFFSGPTRRHSWAPKTSSLTRNPRRSLASPTRGKGSARGCGRSRTTLLSRLPAISLCCLCCSPPRKRAVWKSLNQSPKLQRVTVIRRGMQRAAATRKGSWSLMSQPRRRTRKER

SEQ ID NO: 1392 - protein, 115 aa, Homo sapiens
NQQPTNTKSFFSGPTRRHSWAPKTSSLTRNPRRSLASPTRGKGSARGCGRSRTTLLSRLPAISPPRKRAVWKSLNQSPKLQRVTVIRRGMQRAAATRKGSWSLMSQPRRRTRKER

SEQ ID NO: 1393 - protein, 127 aa, Homo sapiens
SRHWVSRGPTSWLEKAPWTRGSPAAAVEGSWLSCPMGWGRLGAPRTRRTTMGKTSRHPSSKSWRTSALRRRPTRKPWWRPFCRRTRGVWRRWSSPTCSSTTSHSGRWSIPLASTSPTCPNTSTRALP

SEQ ID NO: 1394 - protein, 104 aa, Homo sapiens
AMTQPTPTSTRAPNTGNSTMSACGWSPATPSPSCGTSWAARSTWSQAPDGPTWPGRPSTPTGVQSPGRTAQRATWGMGMGTLGPGSTRTGAAAWWCRWRRWHGR

SEQ ID NO: 1395 - protein, 40 aa, Homo sapiens
GMQKNLQAACTPCSSPENSHWGVTVTTQPSQSPSPIDPES

SEQ ID NO: 1396 - protein, 137 aa, Homo sapiens
ERGEPAPGEMGEGALLAPAGAGKGSGELRKGKNGAGNEAKGAADRNGGHPGPEGRRTDPGRECPMPDAAGNREGESIPPGDTAADAEGASRCQPTTGTTEAGHESPEIKGAGDHWDTTDPAPGGSTGAEGGSPAAQR

SEQ ID NO: 1397 - protein, 46 aa, Homo sapiens
GPGVSHLGGGAGTGPSAVVGSGLPFLLTLLPPRFFTAADHPHSTSL

SEQ ID NO: 1398 - protein, 121 aa, Homo sapiens
GIRGQTLWLGPLGATLWPLGALETSHVLWALWRALALHGGAGRHCLPCPLPAAPALVCRLGPGCLLLGVWPRAPVKPWRHCVCVMGSEGLVGAVHWSSSLPEAAISMAPFAAEDTHCGSVG

SEQ ID NO: 1399 - protein, 120 aa, Homo sapiens
WPFVNSSFKAGAALEIGAGTNIPVLGVQEEDGSNRSSSLQVIIDVDGIQLARDIPMSSSHPVSPNPHHGGAAEIKKSHISVLLILELQLTGRKALDCLRTHLLHLVLMSRKMKRNFWKEL

SEQ ID NO: 1400 - protein, 31 aa, Homo sapiens
TKKSSKESPDRRREKKCRKRKAAEKSEKEEG

SEQ ID NO: 1401 - protein, 22 aa, Homo sapiens
DQAWGALAGAAEPLGGLRGHHD

SEQ ID NO: 1402 - protein, 37 aa, Homo sapiens
VTRAAPARPPWVRSGLQTRGVPPWTRAAFDQVTAART

SEQ ID NO: 1403 - protein, 163 aa, Homo sapiens
STCLSMTTMAPVGLQTRIPWLLCLGPPPGPCCPLSPTNTLPHTPTARSLHPTMSFHLTPMVGAVPAASIVRAAGAVGRHGVMGGQGARGGPRSGPPSPSPAVAVSLSPPAEGAAFGGVGKQVGLAMGALLHPEAQLGVPLISEPTQGSIPMDRPLAWPSPTTP

SEQ ID NO: 1404 - protein, 224 aa, Homo sapiens
SSGSQTVVEESLTKIWTGSWTTTSLLLRPAHRTPGSAPSLAIWTCIVAPSQDPCTGETLPGQDGGVGDPRRLKPLKPPVLSPCPPPALASGCPRHGPTRSTSVGLCSCSPCRALARTSTCGSATSMAGRKASGSDPTAFGLLTRPAWAAFPAGPPGSGRAAPCSTHCCILGLRDPDRWTYMELGTALPQQGPLPPRLQNLEQGSGHPEASSTSSVILVPGEPPL

SEQ ID NO: 1405 - protein, 222 aa, Homo sapiens
GSQTVVEESLTKIWTGSWTTTSLLLRPAHRTPGSAPSLAIWTCIVAPSQDPCTGETLPGQDGGVGDPRRLKPLKPPVLSPCPPPALASGCPRHGPTRSTSVGLCSCSPCRALARTSTCGSATSMAGRKASGSDPTAFGLLTRPAWAAFPAGPPGSGRAAPCSTHCCILGLRDPDRWTYMELGTALPQQGPLPPRLQNLEQGSGHPEASSTSSVILVPGEPPL

SEQ ID NO: 1406 - protein, 193 aa, Homo sapiens
SSGSQTVVEESLTKIWTGSWTTTSLLLRPAHRTPGSAPSLAIWTCIVAPSQDPCTALASGCPRHGPTRSTSVGLCSCSPCRALARTSTCGSATSMAGRKASGSDPTAFGLLTRPAWAAFPAGPPGSGRAAPCSTHCCILGLRDPDRWTYMELGTALPQQGPLPPRLQNLEQGSGHPEASSTSSVILVPGEPPL

SEQ ID NO: 1407 - protein, 162 aa, Homo sapiens
ADLGPCRSPRAPGYPRPCGPAVLATPHLHELHLPTWGSCAGAPPGALGEDRAGTPGLGTGGICALHPESAGPDARQRAGALAGGDFRVEPTAGAAVYRALSGGWCLCCGHRLPHHGGGGGSRAGGAAGLGPEPQRIRAVRAARGPGASPGWGDPRGRRAHQV

SEQ ID NO: 1408 - protein, 45 aa, Homo sapiens
RRWAGSPPDGRWAAPRAAGNVCPSHARRRAPQSSKSPSAARTPAA

SEQ ID NO: 1409 - protein, 88 aa, Homo sapiens
PQPQGSRWLSMGTASCACACRRRTRPLSVAYAGTTTRTPQTTSRLWAGSPLDGRWAGPRAAGNVCPSHARRRAPQSSRSPSAARTPAA

SEQ ID NO: 1410 - protein, 124 aa, Homo sapiens
RPQGVPPQDTAAGPGHRQPHSLGNLRPQRAPEENVEDPGCRACADGWCDVWGCPCCSSPGGGGRRYPHSERTDTFHRPPDRGEARGQSEADQGNQELHPRHQPRPGKEAGGVPAPGNQSQCRQS

SEQ ID NO: 1411 - protein, 36 aa, Homo sapiens
LQPCGVGSSQGGTLRHPRAVPSAAGPLRTPHSHPQA

SEQ ID NO: 1412 - protein, 173 aa, Homo sapiens
MAKTWREKILKLFLPSHQIRKGKKEKLRGKQQKIKCMTITTIMVHLICPLQQEVEGVEVEVVMDILQIIMDMKIIMIIMVMITITIVVDMKIHTMVMKIFKLELEEGVVEEQGVLLHPEVVGLLLPAVEPVIHREEVLDQQEAFEVREEVPNNKEAAGREKGSRPVLTCYNED

SEQ ID NO: 1413 - protein, 158 aa, Homo sapiens
TWRAVAAAAASMRTAPTRRTASPRRSWKGLWNLIARMKSPHLCTPRQPTTCTCSTGPTLWLPRLRLPVSTRWALEPLQARDAIGTGTHHCWATFRMTFSASCPSSWTAYRVTLGAPSLGVERDVHLPWLGQGPETRRAAGSSTWRTRGSRFSCRTRSS

SEQ ID NO: 1414 - protein, 181 aa, Homo sapiens
RSGNRASLRVRPGISPWMGTLVCGLRGRLARTQMAAPWDPASVEPAPATARPRSVVAGSARALAWRSPTVPGTEAGLPGPRGLPAALPVGSASRCGSAPAATPLPGTGAGCAWDRTARKDTAMNICYVPHTCSGQAGVLGNGAQPNAGVAFKLAAGSVRMGLTVQAAMWSTSLATPTRVLS

SEQ ID NO: 1415 - protein, 30 aa, Homo sapiens
GHPEVLGPGFLPCGDHTDLAAGWRGPNSGH

SEQ ID NO: 1416 - protein, 303 aa, Homo sapiens
HPHHLPLWLRQERWGRQLVVLSYLGSLEERARRQEAPRVPLPCFQPHGPLRVPGSWRPPLKIILEELPQQGPQCRPSQCCPLTAPAEVEWPWSPHQVTVSPAPATMVGHAWRRRKGSAAYVCLAMGGTCAMLASASATPAGTPSRAPATSTFPHEGAGRRQRPSAGCTARIWPASAHPRNRTSSTTGTGSTSGSDSTTGPSKATSCGRMASPCSMRTGTLGSLTATSCLERTAWSWCGMIRDNGVTCPATTTCPTPARWGWCPVGRHRSCPWLKCSAAHGCAMRWTLCFATGAGKDWPSAICR

SEQ ID NO: 1417 - protein, 51 aa, Homo sapiens
GYALQSRPLLRDAPRARGCEPARGGVCERPAPTRRGEAAHRGAGPPGCAAL

SEQ ID NO: 1418 - protein, 82 aa, Homo sapiens
GRARGSGSPEVEFERRHGGGGRAAPAPLPPHGYALQSRPLLRDAPRARGCEPARGGVCERPAPTRRGEAAHRGAGPPGCAAL

SEQ ID NO: 1419 - protein, 73 aa, Homo sapiens
PRLLYGRHLRPVRNAPSCVLTQAAIRDILSCPTYRCTAGSTLVRNHTSVTSRTVNEGFLVQTSSKDTKGDIQV

SEQ ID NO: 1420 - protein, 121 aa, Homo sapiens
ERNTGATSSGTMWRVITSSSCALVQTAPWLFGYRSLELAEYSAIGATRSSVSSVVRCITHPQTVPQSGNGSRSVQTTLKQPTTLVLTLKTVPSATSALRRMEAAITCNAPNVNTVSSKLGV

SEQ ID NO: 1421 - protein, 120 aa, Homo sapiens
ERNTGATSSGTMWRVITSSSCALVQTAPWLFGYRSLELAEYSAIGATRSSVSSVVRCITHPQTVPQSGNGSRSVQTTLKQPTTLVLTLKTVPSATSALRRMEAAITCNAPNVNTTSAGCV

SEQ ID NO: 1422 - protein, 79 aa, Homo sapiens
DGATVSLAMRKVAVAKHVLPALAAPTGWTWTHPIVSRAPSRALLSLRGPPSVPVRAAITELPGRAPRWHAQVPPRPPET

SEQ ID NO: 1423 - protein, 128 aa, Homo sapiens
DPRPTGIMILEEADHHCCHREEDPHLRNPFHPQVAQGGFLCLLQATEVVPQSLRGTECRPQGPTWAQSLIAFLLQYLVLQDPFNQVRTTGGPHQCPEAPGSPAPGPLLPLSLETAALLWEEAQYVSPP

SEQ ID NO: 1424 - protein, 130 aa, Homo sapiens
LQQRCPVFHFQVTPYLLTPLHSHPQAPLKEKMTSQRPQLLLVQTILPPKYPRTLWIMLVLLIPQVFHQYRRLTFPRTQTRRRPLLELTRRHSAAPPPMQNSTLPQAAMLSQMSQERGVQPAPFLQTQFPH

SEQ ID NO: 1425 - protein, 95 aa, Homo sapiens
PRCPRTCPPTCATSSLPATSWPCSLPAPSPAGRRWRSWPRSTSAAAAWTRCARAPSSICPACASSTSATTHWPTSVPSLSRAAMPASRPPVPLWN

SEQ ID NO: 1426 - protein, 204 aa, Homo sapiens
TSSASSGQTRSSVRSSRCTAPASCAWARTRPTRAPRRPRCFQSSGPATLSTAAEGTVAASRGAPARRSEASSPARAPSRCPPTSTTTSWGRRTAAHLVSRPRCMGSCTSGPRSCASRAPGLAFGQCCAAPPRSSRCLRTWWTCGASATRSGPSSSCPAVTRPWPWPTSPASSWKTEWCVMTSSPRTGHALWRRAPRRRAAPSSS

SEQ ID NO: 1427 - protein, 235 aa, Homo sapiens
VQQKSSFSGSHKMVKKISKMSLQQVSSWWTPVLGHYRNQEYLTHRIILQVKGPACSPRVHFSSIPNLKGLSSIRPATIATRPWPWGKPPLHSSRPEAHKPELRARASARARPAAPATWRGPSPRRRRRRRRGSRSRPAWAAPSTCPTRRPPPPPPRSTTPAPRCPRRRAGAPRWPRPRAVRPPSCSAAARPPRAPPTPRRAAPRPSSRPAAWPSPTAPARPSTSSCPRPACPRSA

SEQ ID NO: 1428 - protein, 119 aa, Homo sapiens
SRRRARCLALTRLVSSSSSSHPRCPPKCLRRTPLDWPLPIPWSPASPRHRPPIPPILVLRGPLRSPRCWAPHLVLGLASQGNSTLPHLAPPDTSPPHLTHSSNPAAPRWITWLCLRALG

SEQ ID NO: 1429 - protein, 94 aa, Homo sapiens
SALSWTDLDLNVFLAHAQTSSNETSSSTTVLCHCLSEICLLCLPFLLSPIHASLMQTALFSLLAAPSGHWHRSFLSVYILKVAFIAPFSIWSIN

SEQ ID NO: 1430 - protein, 130 aa, Homo sapiens
ALGPRWTKRSCTPRTAPKASSSSKIWRASTFRTAFPAAPHRMTAFRPSPRPAPPLTAVPHLRSPPAPLASRSPPAQSCSIGGGCPGPKDPRVGPTPRAPSPPWTAAPSGRRTRCSITEVGAVLVQHLLSP

SEQ ID NO: 1431 - protein, 115 aa, Homo sapiens
IHSTEKCYGGSCCSSSSNSSSNNSSNSSSSKGVPAWLGAWRGTASSSSLKDPEATHRPCSSSSACSSISPSRAAPWARWRLRWDSLARWGSRGWGQTAPPTSSKPCSSGFCSNSR

SEQ ID NO: 1432 - protein, 88 aa, Homo sapiens
RRSGGGAAGVLRRKTKRPVPWGSRRSGASSLSWPPGWSSLCWWPWASLCTSSAKQQRESSVPSAAPWPMRSVSPLPASVESSTSLSLP

SEQ ID NO: 1433 - protein, 172 aa, Homo sapiens
PPRGLAPLPHPRCCPSAPSPPSPWTRFLRFPSSWRVRSCPRGPQSFPKKAPHDASPYRASWGPSPPSPCTDTARTRAVSGAAQCGHVAHPGIKALLGRSPWRPCSGGPDRGRGEELESTAPPPALGTIFSCSPLGPSERGRGRAGSRWGLWSPHCPEGISWSNCPEAPGPGP

SEQ ID NO: 1434 - protein, 190 aa, Homo sapiens
PPCQMRTVGKAPSPPAHPHRLLRPSPLLQSLPWRPRPMLPSQAWAKCPSSWPSSLRPRISRLERPSTANTATRNTSAWVPSRCTSEATRCPASAEPAGRPSLGPGCYKAMSGPTLARSPSPVPTAAVPSLTAPTCGPTSRPTQMSRSTSARRVLGPSPECPCSTSTKSPAAQDVPADPRGSLFLSIPAPA

SEQ ID NO: 1435 - protein, 148 aa, Homo sapiens
QHLRRRPGQWGPGQRGLPDGLFPSPGEFHSLHRVQPSAGGCRLQRVPRGVRGCGRHAGVGVLENSRRPGCQCGVHQGAGWLGFCGAGCGLGRECGWGSDSGDAAQGHLQRLCGLLRHLSPGIPVPTPGHSAPVPKSLHGGRVCLPQLQ

SEQ ID NO: 1436 - protein, 119 aa, Homo sapiens
PTIRLCGFSWGRGFQWWPQCWTPRPTTPTSGVGSPPRATTAAQPSTSPPRTASAGAASVSPWSTPPSLHPCGLKGQTSLLSTRHIPTTLGLSTTSSSSPMPARLLGSPSTCAMSTVMGT

SEQ ID NO: 1437 - protein, 44 aa, Homo sapiens
GCLAVPANPWAPWGAGRGTLSAAQRASAPTQRAMLLWQTSRGAR

SEQ ID NO: 1438 - protein, 143 aa, Homo sapiens
RQAPGASSGTHPPSAHAPTRPAVSSPPGRGGDQPVAWTCFPSPGASAGAPVPSRLEDTQPPGTTWQLPAATPALKLTWEDHAHHPELCLRPQVRHPPGDPGPWPAGWSLHPAHRPGWQEGQQHPLLLAARATILPGALPALPA

SEQ ID NO: 1439 - protein, 114 aa, Homo sapiens
NYAQVAQTCCLLSRRWCHCHLVSTPSRSMAWAPDHSFPCLRVQAATVACGISENQLGPTRGLTAGSVICHHYLSTLPVTPPASTQLLQFSAAWGGSPWIYLWQAARCIPQALTL

SEQ ID NO: 1440 - protein, 104 aa, Homo sapiens
PHLEQEWGCHVCPQRPALCPPRSFPEPPRPCPCPHQMAPSEPPGETRCGLASESPPPPAVGTALSREGDSGWAARLLPLRLQTLFAPRFLWSTRRLHTHFLYLS

SEQ ID NO: 1441 - protein, 44 aa, Homo sapiens
RCPARPTSPARAPSGPCTLTRATCSRTAATCAARSASSARSSWR

SEQ ID NO: 1442 - protein, 413 aa, Homo sapiens
MNVPRRGIAARAAPTAKGLSNAGVKQAMNYGPTGAAARLWGQSLCCCSPIASTSGRCCHTALSTHCCLTTWRMPLPLISTTAASLSSGQMSPWTGSSVPTSTAATWRRLCLLGWRAQGAWLWIGSMTNSTGPTQAPRGLRWPIWMGPTGKCCCGRTWRSPGPLPCIPWRVPFTGQTGATPPVLRPPAWMALDAASLPIPISSGPMASPSTMPGAVCTGWMLSTMSSRGPIWMGVTVRLSLARASRIPSPSQCLKTACTGQTGTPRASIALTNLRGRTRKSFATNSTSLWTSTPCTPSANLQGKTAVGTTTEAARTCVCPVARTTPVPAPLASARSAATPVPRVLTSSCFLPEGWTSVESALTQRTCLMMSSHWLTCAVLWPLTGTPGMTTCTGQMSALIPSAGPSGMEQDRRW

SEQ ID NO: 1443 - protein, 72 aa, Homo sapiens
CFKCANGNEHNFKGKKRNQVDWPAYQFCSGMSESGDREAEADRTDKAEAGPAARTSPTANRFQKPGTEKSTK

SEQ ID NO: 1444 - protein, 109 aa, Homo sapiens
KGEALKPLDGAVLGPLLLSPNPFLSRSHPNQFSLLCCPCWDSPPLALPTLMEALTFWGQMHTFLLPQPSPQGALPSPGTPSSPPCLGPPVAASAVCQVPLPHQLPPKPQ

SEQ ID NO: 1445 - protein, 127 aa, Homo sapiens
AVTPWVWQPHRPTSTPHLLNGCTTNTTPRGRTFASRQLSPWSLPSSPSCCVASRRLQTLWRPSRGPGQHAQRPARLGCTPTPAAPPSSSGNSIWACGAASCWPSASCWCALSSSVLCCSSTPGRLAS

SEQ ID NO: 1446 - protein, 50 aa, Homo sapiens
WEKIKSSSNTSPPCRSRAKRWPSASFRAASFAPWRLCRRSQSMPKAFLVL

SEQ ID NO: 1447 - protein, 111 aa, Homo sapiens
GKGEPTRSELGALAWRELKLECQPNSVSGPGKLVLEAWPLLSRAPARLRSLLRTARTAPVVWLMWSRSQVTTKSQSSSTRNTFPTAPSWCLWLLRLATPAASLFLAFRSQG

SEQ ID NO: 1448 - protein, 289 aa, Homo sapiens
PVVWTSSAARIRAAASQRVGSVTERMTVGMARMSPRKSVMNAPVSHTSSAARTTAACPAAGSATTTTIAVTTPMKRAAPLGPAPRVSSPVPTAAASRGAGNAMETTTARTARTRKTAPPAVTWTSSSARAATASPCAGAVTQTPTAWTAATRRPAALACGPAPWTSSSATTPCASRWPGSAMARMTVGTTQMRTPRSVPGSCALPTGPSVARMTASVCGSGANAMARTTVGMGLMKRTVSPPQPTPPTAKTRRSFCAGTSAASPPPCAATCSMTAGTALTRRTAASTPS

SEQ ID NO: 1449 - protein, 171 aa, Homo sapiens
PCPLTPAACCPHLKLVTSLGPAPGAMGPACPGIRPTGWAAGAPPAPQCLAPRRNVDVSGPAVSAWPAILGPCNLEMERRPPPAVSGVPTAPKVLALDAMGPAPLRMTVGSTSERSSGQGTAPRLRAGLLTASSARGRASACGRGSSRGQGRPAASSPCSPPMTGRASATLC

SEQ ID NO: 1450 - protein, 150 aa, Homo sapiens
RKDRCPTAACRTCTTKVPPEQCLTWAWGSASSFPMEPVTTEGMNLMGSSIQAKALPRDSRRMEGTSPACTHSSRITNAIWTACTGPQPSATRATCTTCSTAASSRRCTTSMEAPTRARTAGPSRASTRIPTAGRGCRARGRSRHTESRLR

SEQ ID NO: 1451 - protein, 373 aa, Homo sapiens
ARPGAGAASSAHPSAQRVSGRSARLVLVTTTRPPTSATTPDPWARSHPECHSASLVPCQPPLGHLQAFCPPIAWSPGLNPGPIPGPALSFPCPASLPGLVLRFLNQVPPPACVSATPRSAAQDAAFPGPAATPALATLASGSAPRAPDALMWTNVAACPRPVLPGAARTHQAASAACAARASEPAHGLRNAWMWTSATACRRRVTSGAARTRQAASCACAPPGTRLHRTEPAARMWMNAPRAQACVAEGPARTCLALSAVFARLASGARRVKRMWMSVPRSRRPVGPAAVTTRQAPFTVPALLASAPEGPGPPAKMWMSVPEAPHPAPTAGVRTQKAASSVSAPWASNPTLLAPSARMWMSVRTTSHALGRSV

SEQ ID NO: 1452 - protein, 170 aa, Homo sapiens
SVQAGGGFLLHRGAAEGGICCCCCCCCRRHPSPWDSHLRASSHPQHDWPASVCSSTTSAQSPVLRPRTSWPGVLPALRGSQQVSSWVLLAHSGRSCIPGSAILPDPSLTTHLHQCQLGCCPLRRLLSLSGPEPVAKLQRAPAASTCDEISSDRHFSTPGPEWCQESPRGG

SEQ ID NO: 1453 - protein, 133 aa, Homo sapiens
KPKLKSCRSSPASWNCSTVCTRCRRRTSCKGPWTISPRLRSISPPEWTTWFLPFALRTVIGWSHCPWGFSITCPRRKRRRKRKADTLIWCSVSSQAPLMLPVLMGWGAVASRMSAASTSPWSSAATRSWWSWT

SEQ ID NO: 1454 - protein, 46 aa, Homo sapiens
ECCVKRSSILAVTFGDCGWGAVASRMSAASTSPWSSAATRSWWSWT

SEQ ID NO: 1455 - protein, 169 aa, Homo sapiens
RRLQVPALRGCGPTMGPKEKEQQHDLREAEPGHEVLLQTGDPGTGGWPATRLQVWQKLKRLEGGRGSPESELRVGTIPGTKLTDHSRPANLPGRTGRPDGPSTGECSQLCCGEKLMFWCIVSHRPGTRRLWPRLPTLLLELQALGFEADFIAASVSPFIWCLLKPSLRH

SEQ ID NO: 1456 - protein, 42 aa, Homo sapiens
CVRPRAPRPPRSPGPSTMSPSCGMAATAPTSTPCRTAPPSAT

SEQ ID NO: 1457 - protein, 134 aa, Homo sapiens
SRRRASCPSARRTRATRSAACSATTTRAAGTAVTAPSTSMTPGRTARSLCSAGSTSVTATVTASATQPAASSTALTASVRKASATPCTTSTARTTSATGTATRAATARSASGTGWTVRSMYPRGWRPARWWWWC

SEQ ID NO: 1458 - protein, 123 aa, Homo sapiens
WQRRRRRWGRARAARGRRSRAARGPALPCRCSPAPASSPSATRTARSSGTRSSRRCASRCAPARTRRASPSTAMKMCVSLSAQCPERQSAAVWASSPSSSPWAATASSSSSPHPTISVPSTTS

SEQ ID NO: 1459 - protein, 75 aa, Homo sapiens
SVQGQGPGSTSPPETETTMTLMMMTPLTPKPGAWRLTVPRGDSFTASAATAVAWEVRPACSPRPRPSPTPLSPST

SEQ ID NO: 1460 - protein, 75 aa, Homo sapiens
TGPRRPTAAESCCGAARRGQRGPHAPRGRPRQRSSAPSARASSSVRRTWSCTCTRRTSRSSAGCAATRRCGRSRC

SEQ ID NO: 1461 - protein, 167 aa, Homo sapiens
VCIRKSIQEKNLMYVLNVGRPLSGSHILSHMKEFILEKNPMNAVTVGNPLLKNHNSMCISEFTQERIPLYVQNVGRSSLTRQISLYTRKFIQEKDPIYVLCVVRPLLTGQISLSTKKFILERNLINAATVENHSPGSLGSGYIRSVILERDIMNAVNVGKHSFRSQH

SEQ ID NO: 1462 - protein, 99 aa, Homo sapiens
WDEWAFLAKTAKMDTTATGGTAERKVHLAGQVTGESQDQRAKPGPLGGLAPVAPRGSTVPPGSMAHQARRGPRARRGSQASQAPAAVAVAIPSQLSRWQ

SEQ ID NO: 1463 - protein, 119 aa, Homo sapiens
ISAGARMTWWPWTDGCTPWGVTTVAPASTPSRSTTRGPTSGWPHPACSPGAAVWVWRCWSCSISRRHPPRRCPCPPPASDPPTTRGLQPPTCLKGTVAPTRDVLRHPFTSLHPFLHVFI

SEQ ID NO: 1464 - protein, 127 aa, Homo sapiens
STVKALRACAPWISLSGTATSRASSRTSSTTRAAARPSPRWSSGIRIGLRSGRSCSLPPRAFTRASLCIAARRPSSTLAMCSLWAPCLRVQSCAAWRRSLETVASWPGHQGTMPPLSPTTLRPRRPV

SEQ ID NO: 1465 - protein, 318 aa, Homo sapiens
TSPTTSPSTPASSLTCGARSSDSSARLMSRLGGARPGAGRIGVTSATSKLRSSCTAGRVRRLAWDSFGSSSPAPSRSRWMCGGACWSWRTAPWRSRLTPPDTCSPSPAGSMRSPAGPSNGGRSSERSATLRTTARRTQTQVMTNQTSWSHPRWPQPGRALQPWWTSRSNCASRSWRWSSAAGSCARGAGAWRRRCRGASAPRSSARCSACCAACTSSRWRTPRCSRTRCSATVRSATATRPCAAWSSTAVSATRLSRASGRSSTTTTWPSRSAWKSSTKCTCGSWRRAAWSRPPSWTKWPPGPCRTAPCPKLPQQEPH

SEQ ID NO: 1466 - protein, 109 aa, Homo sapiens
PSPRRAPTADNSERTKEEGAVSQKEQGSSSHPARLAKLPAQEAPVPPSAYEAAWSWRCGQMEARVYSIAPPGLEEGTGTKIPPNHCSKQGPQESIQGHLRHKVHQALSA

SEQ ID NO: 1467 - protein, 78 aa, Homo sapiens
SGSSLSEEMKGSLRSLSSKKGGRASSSLLTKLLGTHWLRMNAAYTCSCKRRQLTGTTSRGRCASRSPSHHLPSTFLLK

SEQ ID NO: 1468 - protein, 164 aa, Homo sapiens
ALEGRWRRWPGLSSRSPTEALSGLKMSRWKLRESGPQVPSPLCKVPASNMSAVMLLWPWVRPGPWCLKMSLASVPSLSGIGRTSPQRIHHRRPRLRVSRHGPGGERWRQQALGENQSPQVLEGPWPTHPGAHCPPITARRCAWLDVDTVGAAYVCRTVGPVSTA

SEQ ID NO: 1469 - protein, 161 aa, Homo sapiens
FSTRKFTVKAFFQKGLTPLNIRRFSVDQHLMNAPSVGRPFLHRLIWLVTRKPILENSPMNATSVGSFLCITPNSSDIRKFTLGRGVTSAVNVGNCLWTASHSVDIREFILEKGLLNAAYVENSLVTAPHSICTREFMLAKGFISVANVGKPLASNIMLFSI

SEQ ID NO: 1470 - protein, 56 aa, Homo sapiens
LLPPLLQSQLKRTVFYRGRDLLGMGSPGPIRACCPWEAHCPMNFCLLTTPQKAQKS

SEQ ID NO: 1471 - protein, 119 aa, Homo sapiens
NIDPHQSNFPQAQEIVPQVTILHHNRQAAFSNLQLLLLLLSHQVFLGNHLWISIKLACFLQLPYHLPAHHKDLELLSHLLLHQPLHRPHTLLMLRAQLLVPLQPPLLPKIQASPLSPLC

SEQ ID NO: 1472 - protein, 89 aa, Homo sapiens
NIDPHQSNFPQAQEIVPQVTILHHNRQAAFSNLQLLLLLLSHQVFLGNHLWISIKLACFLQLPYHLPAHHKEPRPPRSWQTLLDLTSSM

SEQ ID NO: 1473 - protein, 92 aa, Homo sapiens
ERPPPGLGGPVATLASAASSLGRFCLGQGCQYAPQQLHAWLFSLVLLSTPGHDAETTDDVSCPREHPRETSEQGKEDPGPACICEKEPKEQA

SEQ ID NO: 1474 - protein, 160 aa, Homo sapiens
RQRVPGLPTWRAARPPPRSDPHCCVAQPQVRSRGARPRTPCLKFRPYLSPWTGYSSLGPARDRTPPTKRRRTSSRCRTWRAHIPELKLQGVLEAAVLVPQKRTADCWTVSWTLCWRPQVPGRANPALPPARSPALGACLAPNFPKIHRLPPPPSGCCPRS

SEQ ID NO: 1475 - protein, 99 aa, Homo sapiens
GCGCGRIPSERHQEPPWLGGGCLCCRGPGPAGNRSCEPVEALDVGELPQPLSVPQLRLQVPSAEVRRELRRGQGEESACLECPAGQHAGTTQPQRQSQH

SEQ ID NO: 1476 - protein, 110 aa, Homo sapiens
RDKRVKEASRGYKVSLGFLECKDLRGHRDHQDKRVILENQDYLEQKGQEDLREHLATLETQDFPEFLAKTARQAPQVFQDAMAQRGREGRSGLLACLVSLEIPDHQAYQG

SEQ ID NO: 1477 - protein, 107 aa, Homo sapiens
PQGTSTHRAAPWGPAAGPQGRAMGCPHYALRRFCHHLHPTDPSPTCPMEPHSDQASPLLSKSEKTQGLEWVALWRQLNSQVPRTQACPALAKQSWRSNGSASDYESC

SEQ ID NO: 1478 - protein, 183 aa, Homo sapiens
RRRSCTRWNGTSAFPKTWSSPSAQTCRDPLPWRLPSLPLSPLRGHSQLRPKTRMQSWPAPCSTTTRSWSSSAAWSTGRGTRCPLCFHRPLPASPQLTGQERRAAQAGRPLQVDRACGQAVTRRSACSSWMTWRGRQKPWPGPSPQLAHLGGQAVPGPTPRRKGRVGQAERRGSACPPRKRRRT

SEQ ID NO: 1479 - protein, 88 aa, Homo sapiens
QSPETCSMVWTLRKRKMERKKYTQVTVKFGHTQLRGRNKRQEQDVPMVKSSPHLARKPPRPSMTSLPLISLRSLIHRSACPRRLLLRS

SEQ ID NO: 1480 - protein, 221 aa, Homo sapiens
PPHLPLPPPHLSLILAQRQLFSQGFLLQHQSQQHLSPSTCPLLFPHFSLLLKDLCHLQIPPIQAFLSLIPQALPLLFPHSRGCRRPLQSQLSHHYLWLPQPHPQLQSSQDSPQHSVPISTPLLLHKPVYHLDFKLQAVLFFQAFCPSRVSLGFLRILHNHPCKNYSIMRLRSQHCYSRSIQLRLWKAIQLSLMGFLVILQRQEHHFLCNQACPRVGGSEYF

SEQ ID NO: 1481 - protein, 29 aa, Homo sapiens
IIQLDFLSIFHHRACQFSSTTYWAKHILN

SEQ ID NO: 1482 - protein, 113 aa, Homo sapiens
HMHHLQAPGVQPVWLQPNTPPGGENRVALSELPNQAATGGQPRRADPPAAAHLTAAPCRGPSPCIWNIPSEAERATGAGPAFRPPACQGQPSIHQGQPSAQQGQPPGQAPQGF

SEQ ID NO: 1483 - protein, 123 aa, Homo sapiens
KVVAEWTMRKRKKREKEGWKQMAPQTLSSCTLCLKDAVPQTGFARPGRTCALSPFPTSPWMSLRAFSSWGSSPPACRTISWCAPLTRGSCQMTMATMLFLVSLGIVLAVERKASVTSRNSPII

SEQ ID NO: 1484 - protein, 87 aa, Homo sapiens
AARRMRRLHRGRQTTHHPAPHCSSARRPLGCRPCTAWATLRAPAQCQCRCQAEVERTHCNTTMACRTPSSTPCQPTSWTWAPRTHLP

SEQ ID NO: 1485 - protein, 50 aa, Homo sapiens
VWLQGRNGSQDQIWGHRGPGTPPQKKNVFHSACSPFWKEEGCDDDRGSCT

SEQ ID NO: 1486 - protein, 197 aa, Homo sapiens
SQGKVGAPCSRAMSGGDPSSSLSSPGTTRTPTTSAWTLWKARGRRTQGSSWGLPRSHPLPLPKRASCASPFSRSPGSPRCPSWSPGRPGGTATPGPTRAFFHGPSPAPRRCCATPASATSRRRSSPAWCARPPSASCISSPTWRAPPSETTSCSSPSGTLRPASVPCMARRWSSSARPTRPASATFACSRSTRIIAP

SEQ ID NO: 1487 - protein, 101 aa, Homo sapiens
APRVAAPGPCARASGSAGMWTPLPTSASAGPSWSTRCQLRASPATCLGHLAPASRGMTPAARGRPAAGQSSSCSSPAQTPPRAGCTLTTMACTIQAPRWVA

SEQ ID NO: 1488 - protein, 175 aa, Homo sapiens
TARTTPWVITVKGAWLVTMATPSLGQEITAALALAQMVPTVDASLPGAATKILLLYSLPVFVILDTLVPDVTTVPQDTLAIHQKLGGRVSLASVTTTLTRQTQKPVTRRLGGVSSACTTRKGNTVSSAGLDTMVMPSSRTVESVSVITWAPCKSTVTALTASATKPLVSACVFLM

SEQ ID NO: 1489 - protein, 212 aa, Homo sapiens
TSAWRAISASLTASASTLTAPLPVLVPLATDPDPAEPLASTLTSAARRTFARAASVPTPTAPSSASVLRDTALARTSPPASTWTNVASEAQPCAGRSAVRTLPAPTAVSGTAILGTTRAPRAPVTMWMSAKNMVPRFVEPSVVRTPLAPTAAHQPVTLAISPRQGADARMWTNAGTGPSAVPTPCARTCPAPSSASVTRVTRGHGMGVTAWM

SEQ ID NO: 1490 - protein, 54 aa, Homo sapiens
AAPAAATVAQTPRPWTTQDACPSSADFPSQMTKPGSAGRKAEKADEDFDLSGTL

SEQ ID NO: 1491 - protein, 26 aa, Homo sapiens
SCLGLCRSAGRKAEKADEDFDLSGTL

SEQ ID NO: 1492 - protein, 58 aa, Homo sapiens
RMHRSCFFIIGNAPQHADFTLAIRRRGILAPRISCDPDAVLQIFVSQRARPCLHVDEP

SEQ ID NO: 1493 - protein, 58 aa, Homo sapiens
RPEGQIPPEPGQDDPALRRGCSAWPGHTVSHRSADHPHWLSWPWENRSCSPSPAPLLC

SEQ ID NO: 1494 - protein, 60 aa, Homo sapiens
EVILPRAPPNSQGAYGRLLLQGLQWLPPADPRCCHLDSPCYSGPVPGGRGRGRHLHTQPA

SEQ ID NO: 1495 - protein, 197 aa, Homo sapiens
LGRRVGRQLHGGGRAGRSGQRSIPGPRRLVFGGCGRSRPLPPVHALRPVPGFPRRLGPPAAPPVGAQELGHREPQPQSLLHLRQVRRGGLRAGGGVRLREGRGQAVRGAGALWPRVAGEPLPVPVHHRRPHQADQVQGHEELHLLQAGAHAHAGAGASALQALRLAVRAPGGEVPGHLRAPPAREAGHRPLRGGLHL

SEQ ID NO: 1496 - protein, 62 aa, Homo sapiens
LGPETPGDQARIGQSRGQGEAPPGPERLQARGSQLWWGGHQCQCQGKGRHRADRRPDTAQEG

SEQ ID NO: 1497 - protein, 30 aa, Homo sapiens
NWSHPPKQPPPHPNLADWRSNRKLTHSGWV

SEQ ID NO: 1498 - protein, 24 aa, Homo sapiens
GRHSPRPAEAHLCRQAAGRWPYSF

SEQ ID NO: 1499 - protein, 24 aa, Homo sapiens
RRHPPRPAEAHLCRQAAGRWPHSF

SEQ ID NO: 1500 - protein, 24 aa, Homo sapiens
RRHPSRPAEAHLCRQAAGRWPHSF

SEQ ID NO: 1501 - protein, 265 aa, Homo sapiens
GPRSPAPGQPAQSPSCCQRPTPRSSLPLPGQQRQTRSPSACWSLTSRRSESARSFPRRGTCTSWSRTRQAGPGASWWCGAPMPTCTTATRTPWSGSCSTWPLPRWSTVRTSRLCSRHPTHSRCARNTAASCCRPPATRTCMTGCTPSTPSWPGPYGPSSPEGGLPRCGSEPEPSRDSRQAQPIPSLILVCPVTCRPAPLLPDSPRPGRPPRGRPCQARGPVPHDQLCSQQRLCVSVLLAECALVEQVGRGWGGQGHRLRGFLLPF

SEQ ID NO: 1502 - protein, 22 aa, Homo sapiens
LEKKIAEDLINLTMGDLIALVT

SEQ ID NO: 1503 - protein, 93 aa, Homo sapiens
HTHRYSSSQVPRLRHGLCDQWRIGSASSLQTHPREAIQVFHVRLRQCRSQQIKTSHSLSYWRASVSVQFVQLCQQGHIQAEKAHENPFRGKAL

SEQ ID NO: 1504 - protein, 78 aa, Homo sapiens
GLCDQWRIGSASSLQTHPREAIQVFHVRLRQCRSQQIKTSHSLSYWRASVSVQFVQLCQQGHIQAEKAHENPFRGKAL

SEQ ID NO: 1505 - protein, 156 aa, Homo sapiens
KESVLGNGREKEKKREIVKGIETETTIESGKERGNETGKKNGNEKEKRERGRESENGRESESENGNEKEREKGIKNENAKGIGKTKTKDEMTAEKSEKRSEKIGIQEMDMMKENQRSAIEMKGVPALDSPRSAGVNILRTVMPTTVEMIKMKNTDS

SEQ ID NO: 1506 - protein, 121 aa, Homo sapiens
DSTWAEVLVGDRRSGRLTEMLVIFLVFQSFSHSFLNTLMSLPSIFSSWPCFCSSQLVSCLRTCRSVCLSSAAGVSRVASLIWIPFGHSSLEFLPPAELWSLLSITYAQKLFFYYWECSAAC

SEQ ID NO: 1507 - protein, 91 aa, Homo sapiens
VPAPATTSTNRNPARPLFQMNSSHLDPILSNGQWSAVCPPDSRQLRSLPTLTMSLSLREPGPARRWCTLAEPWSGPLLTPGTNAGNTPTPK

SEQ ID NO: 1508 - protein, 42 aa, Homo sapiens
TWSSPQTWEAQEAETGREGRTWAGPWPRTAQIQKPSAQDPGI

SEQ ID NO: 1509 - protein, 29 aa, Homo sapiens
STKMLLFYTKSCLKHAETWREMRTLMSQM

SEQ ID NO: 1510 - protein, 57 aa, Homo sapiens
IFRQKVTIKLAHFLSLRFWSIWQQARSAFDINSRAQIMQYPQPVPQELMLWETHLDL

SEQ ID NO: 1511 - protein, 92 aa, Homo sapiens
VTTYPSLMPKQPSPCPPSMGSTTSALKSSPRTFFMWTSPSSVYASAQGTSTFSRELLSPRISRCWERYAFEDIWMHSGSWKRRASATGPSQA

SEQ ID NO: 1512 - protein, 165 aa, Homo sapiens
ATAAPLPWLFKAPFSLLGGPCLFQSMPRASRASPPRRPRWRPNESTRLPRGLAVPAQGHLGRTHPHSQLLVAGGQVETLPDPQTSVPVPLHSSPHSPAPPTTSSSASKTLVLLSLLRKKKTKSGVFFCFLFFPFPPAPTHGAFFWRWGLGNEGLRSRKGFYFFEF

SEQ ID NO: 1513 - protein, 179 aa, Homo sapiens
RRTQVSSPTSAESAPRSSCGETASCATEDTVSAGTAWAGSGPYLGLGLPRGHPCRPRESLPEWAGAAATKRVRPRPRPADVSGPHPESTRWRWASVEVEEQTEGAGYWGGVAFGKGNKEHDARALWPPGDLPPHLLSSFISVDLYIFWKGNHSFTIARPFYYSTPPPQGISRTKPFLSL

SEQ ID NO: 1514 - protein, 219 aa, Homo sapiens
KESVAPLEELDSQAVVVTPAPLGLQDMVLLVPLVTKDKQAFLEALDPQACQVQRVNQEKLFLYQAPLEQKDCRGPQASQVPKETEAFPEPQEGQACQERRALWASQALDFQGPPAPKVLTAYLETWGHRGLQVARDLMAYLGTQVCRARRESLELVYRDSKVCQVFPAFLAHPGRRGALGYQAFLENMERSDPLGFRGSEVNRDLLDCQAPWGLQEFQE

SEQ ID NO: 1515 - protein, 98 aa, Homo sapiens
RGTRDARTLTFCGRFPCRTWPSLTSGVRKARRRGAACPAHSAHRSAPAWTPWSDAATSTCGPCPRAFPRMSQNSIWTGTSSRWFRDSCLPSSTCSSWT

SEQ ID NO: 1516 - protein, 221 aa, Homo sapiens
ERNNIYVGNVVKHLAVAQNSFATRLHILERNLMNALNVGRHFAVSHTLLDIRASIQPKPRMNVMNVGKLSVVTHSLLNIREFMLEKSSMNVMNVVKFSLGMHPLFNIRRVTLERNPMRVLNVIKPSAGAFPSFYIRELILERNPMYVRYATNPSAGAQTLLNIRGHTLLTTPMNMKIHLITTHSLLNTSEFTLQRKTMNVWNFLKRSIMPYFRELLERSLM

SEQ ID NO: 1517 - protein, 84 aa, Homo sapiens
LVPRCASLLWGSPARCKGMWCTSCQQGGSTISSASLPMWPSSRPWPRPLALPLSLCCLLRPPAPPLPLLASAFRLLLTRCHQPW

SEQ ID NO: 1518 - protein, 43 aa, Homo sapiens
KVSCRVMVMILITSLHFSLEQQPAFTSVIYLSTTPAGGMSNLF

SEQ ID NO: 1519 - protein, 113 aa, Homo sapiens
KKRTYMKNCQNGKKGSRRRGRMTKTVTRKLLMKKLMKTAQACLLQKRQGRHCLRRLQQVNSLQGLLSWIKSLKRMMLMTSVQIMCNRTMAFYDFFFNILSRLLNCSLYKLWYA

SEQ ID NO: 1520 - protein, 89 aa, Homo sapiens
PERQHLPREQQPPQLQWSSLRITILLTLPVSPQGPPWIPHGSSQFLPSFPISTRLPALCWGPPRPWPAGAPLPSSRRQLRGMGGQILDS

SEQ ID NO: 1521 - protein, 112 aa, Homo sapiens
CMGSSSGHHDTRPCPGTASAAREGQSCKARAREKRGRNEGKTGRGRAKEAGRTPKTTGGNSSATAGRRKEKARGRRTCPKETGRGSASPAGARNCIKATARRGRKTAARRSS

SEQ ID NO: 1522 - protein, 44 aa, Homo sapiens
GAGPRPVRPRLTGTPWSPQRAQAPGGTLQPRGSAGARPPAGLST

SEQ ID NO: 1523 - protein, 147 aa, Homo sapiens
SLDKSRTPWGVGLMPLRHLSGSSASSTYGTASFAHKKLSTSPTAPQTCRATSSRGWTITSMCSEGPPSGPWRRVRSVSLTCSRLLLCPGGRDQAVAMEVQGHRLPHLNSCQSGLRVPRAHSPGISKTRAGAVSVTGLFVPYQYSVAV

SEQ ID NO: 1524 - protein, 81 aa, Homo sapiens
PGQVCGPAGREPAESGLRPHPALRRPGKQSLPTLGKNRQRGHLHPPGTQEVDAHRERPLRLPGGDPISAGCCLCPHPPAAG

SEQ ID NO: 1525 - protein, 90 aa, Homo sapiens
QGRARPRWGCVQRLPHHPRPTDIPQEPPGRGHRLRLAGWGEAGCDCLLGPDGKPVRRGDVRARSLSDRARPGVDALLHTPHPAARGDLLP

SEQ ID NO: 1526 - protein, 146 aa, Homo sapiens
AASAPPPLPSHSQLILGQCHMYVMSVGGRSVSSQNLLSTRSCILERTSMSMVSPLSTVWLSVKFRKVRLEGNVLNVRTVERPSIRVPPWLNIGRFMLEVILWNVRIRNVRKPSCLAPPLVSFRKYMAKTNSTSAGCVRKPSFIVLP

SEQ ID NO: 1527 - protein, 57 aa, Homo sapiens
CPQRKPRTPGRSSGPSPRGTRTPARRLMTDVPLGAGDGSTAGTMCSAPSALWEPQDK

SEQ ID NO: 1528 - protein, 57 aa, Homo sapiens
HPPRVALPSGTGNTHSAGRWGAHGGAVQGDYKASETVGQSCFPVAGDPGPPVQKHGS

SEQ ID NO: 1529 - protein, 138 aa, Homo sapiens
SMKMQVSFTREGSLLLRLITVLCCFKISPIMSALALEAASLLRSGLSHSTTHITLISSIITASISSKGGLLPVPIPHPSHIEMLLLTSCLIWRIILTNPPLRGAATRVRHQHPPLPGARAVVDMVAGEVPKAEITAEG

SEQ ID NO: 1530 - protein, 148 aa, Homo sapiens
ICSPTILGLPKTTTPLRTVRTASRAQTPSSSPGTASRPCWMCNGFLPSRASKMTAASLSASISQPCLSRITSKRGVTQWSKANQLYLQLCWPASQEVDLFSCGSFSWSCYQTNPASHSSAGLETDGSLSSPTPMRWPAGGERGKISPR

SEQ ID NO: 1531 - protein, 79 aa, Homo sapiens
NPAECFLCLSSEQRVLLRQVSIHVQDGVCCLWQPTPAGGFPLCLPAVPQPGPQAVCAQPLDPLLHTGRKRGVGGQSPLL

SEQ ID NO: 1532 - protein, 64 aa, Homo sapiens
AALRPRGSRHVWSVASAESAAPAAAAPACNLCLHHARPPQSPHHAGRPQSPHHAGHLRSLDHTQ

SEQ ID NO: 1533 - protein, 69 aa, Homo sapiens
EHAKWGPTAGAGREEVSRAGQRGRLPPRAGKPGWRPRSWASQHRGCHLEDRAGHQEHSGTVAGSPGVQA

SEQ ID NO: 1534 - protein, 53 aa, Homo sapiens
RNLEGLPYVEPSLHITEPAHFPQAHPQRLLSIRSFAWKLLSSTAGKEMPAKKL

SEQ ID NO: 1535 - protein, 47 aa, Homo sapiens [sequence omitted]

SEQ ID NO: 1536 - protein, 73 aa, Homo sapiens
TRLRAGPSCTSTPMPTSTRTPASHTWASRPTTHRSSTSALTLKGLPTSLTRLWLKRMAGCSSTAGKVIAAPQR

SEQ ID NO: 1537 - protein, 51 aa, Homo sapiens
PGDLCLSKPLQLQPMSWGGHVRPGTPWEKLHVPLPPRVPAGLESAGLCGRG

SEQ ID NO: 1538 - protein, 71 aa, Homo sapiens
PPVRGRPSGPPALFRSFLVCHLSAPAKPCTDFLRGNHGLGAPSFQSRTLLQRTKLAGLLPSLMKNKSILSS

SEQ ID NO: 1539 - protein, 115 aa, Homo sapiens
KEALVLQLIQKIVLSLPVQWEVYLVPRSGSLQCRQYMDFISFVVLIGKRYILIQKKIKLKMFFKRISKNVWVLLSVLKKKTVIAGNHYPWLISMKKLQKICISCQTSFLLLVEQW

SEQ ID NO: 1540 - protein, 39 aa, Homo sapiens
RWGRCSGDSRLPSASTPPSWGVSSAGPSPKMGAGVCGNG

SEQ ID NO: 1541 - protein, 133 aa, Homo sapiens
TRQASRQTTDPVGTVVALPGAGASSVGAEDGAVGSLEEEGTEAMGGTGSSPGVGATEAPETTIAAGVRVVATVTGARAGPTETVMTVTVEGARPGLGEGWPESSDDLWGHCPRRDFTWNKSWRQPLAQEACPL

SEQ ID NO: 1542 - protein, 103 aa, Homo sapiens
ADPTGALASRLGGATTGLAARMVLRLPRQALEPPHLLPSPARGDRRGQRHLHLQLLQHIGELRAKLVPHEPQQPDGQAGRLPRGPQPARPGLPLPCHTTAQRA

SEQ ID NO: 1543 - protein, 72 aa, Homo sapiens
NRIYSLKNQMKLKVGSLQNLLLKTYRLTLRTPWVATHPGQAGRMTPRARPSTPAWPALPTAPGGACARQGGW

SEQ ID NO: 1544 - protein, 50 aa, Homo sapiens
SDSHKTRPPSPFTRTATWPPSPLQPRSWGRWEKASAGSAVSARRWSVSPL

SEQ ID NO: 1545 - protein, 47 aa, Homo sapiens
LSRSAMSTTTPPSSHRAYTSSPWWRQLDLAHWWAGSGPRTQTWGTTP

SEQ ID NO: 1546 - protein, 78 aa, Homo sapiens
WQEPPRHCLWLWCRPSWKGKGASAPRGPGMPNSLNQGIPGRYLTGGLWAWKAGTGAQRVCCLRCCFSPLKKVWNLQGL

SEQ ID NO: 1547 - protein, 76 aa, Homo sapiens
QPPRHCLWLWCRPSWKGKGASAPRGPGMPNSLNQGIPGRYLTGGLWAWKAGTGAQRVCCLRCCFSPLKKVWNLQGL

SEQ ID NO: 1548 - protein, 31 aa, Homo sapiens
KRLLRRQLVSTGLPSMAGVFSVRETLMQVRW

SEQ ID NO: 1549 - protein, 104 aa, Homo sapiens
AALDPAEWPRLGTLGWHEISTGPVITAGGTGPCSQSSGCPQRPSWRASSHPRQIPGLLGCCSGRSSHWATCPILGAPTRRCWTSSLEEAGWTLLGAAQGLCTAS

SEQ ID NO: 1550 - protein, 95 aa, Homo sapiens
TSGCGRTAVKTVGPGGSSMPFPIISEADGLLSSATRRTSRPRKQDHGKYPVLGDRGNISATAPQPSAHAQMHLGQMTSESLFWKCRRPSQTSEHR

SEQ ID NO: 1551 - protein, 40 aa, Homo sapiens
IIIEDKNTWKKYGLLLRKCTSIPRSAHGANSFSITTKPLI

SEQ ID NO: 1552 - protein, 50 aa, Homo sapiens
TGAAAPHPLQASPAPSSLLPPAPSSPARPISERPGASCRLAHHSVPRTSW

SEQ ID NO: 1553 - protein, 83 aa, Homo sapiens
TGAAAPHPLQAVTPGAPEQVPPQPLPPPPQGAAVASARAHRPQASPAPSSLLPPAPSSPARPISERPGASCRLAHHSVPRTSW

SEQ ID NO: 1554 - protein, 108 aa, Homo sapiens
VFLGSPDKVICPARLGQDYIQLTQDRNFTNVMSTKNPSLMSSTLIFINSYTQERSLIHVMSVEKASVTSQPFIFIKESTWERNAISVTCVVRNLVRAHIFKLIRESTL

SEQ ID NO: 1555 - protein, 47 aa, Homo sapiens
GLQHQVEVHMDNRWEFWGLQGSRHHLHIPAHIQLDPLSYSSQQHPCL

SEQ ID NO: 1556 - protein, 223 aa, Homo sapiens
QQTVCLCCAGACVGGHDVAADAYPATDAADPVAPAAAGLAPAAASPHAPAATGVLQEAAGAAPPAAPHPAAGWETAAQRGTGEQAAGLPAAAPANATVAAAAPAQPAEAGAGQPAAQPSLGAPPDPSASSCLPNRPAPAVEGRGCPRAACRGQRQAGGAGPHWHGRHRYLVCRSPQGLTPPLPPYPAQRTAYCAHISERQLFPRGDPRLPPPVRTRRVQVARL

SEQ ID NO: 1557 - protein, 222 aa, Homo sapiens
QQTVCLCCAGACVGGHDVAADAYPATDAADPVAPAAAGLAPAAASPHAPAATGVLQEAAGAAPPAAPHPAAGWETAAQRGTGEQAAGLPAAAPANATVAAAAPAQPAEAGAGQPAAQPSLGAPPDPSASCLPNRPAPAVEGRGCPRAACRGQRQAGGAGPHWHGRHRYLVCRSPQGLTPPLPPYPAQRTAYCAHISERQLFPRGDPRLPPPVRTRRVQVARL

SEQ ID NO: 1558 - protein, 221 aa, Homo sapiens
QQTVCLCCAGACVGGHDVAADAYPATDAADPVAPAAAGLAPAAASPHAPAGVLQEAAGAAPPAAPHPAAGWETAAQRGTGEQAAGLPAAAPANATVAAAAPAQPAEAGAGQPAAQPSLGAPPDPSASSCLPNRPAPAVEGRGCPRAACRGQRQAGGAGPHWHGRHRYLVCRSPQGLTPPLPPYPAQRTAYCAHISERQLFPRGDPRLPPPVRTRRVQVARL

SEQ ID NO: 1559 - protein, 56 aa, Homo sapiens
CLINSSSASSPASHLLCAPRQSAQSHVHPRSALSPAHHQSVHSPAHLSSASKNVLL

SEQ ID NO: 1560 - protein, 41 aa, Homo sapiens
SCRWRRGRTRSPPASPARGCSCVSSAAGSRRAHSCGARCGR

SEQ ID NO: 1561 - protein, 36 aa, Homo sapiens
EKNSLKKSSQKSATASCAHTTPTLKSSLQKSISAWP

SEQ ID NO: 1562 - protein, 113 aa, Homo sapiens
VVSRPRRRCRSWCGGWGLCWRRSGHHCFRPLKNASRSGWPVSAPRSRSTGACWMAQVWWAMPRKYLRKQTSLALCKPPSSCTTGLPEPLKPSRHSGQLPAPPSAIASSTWDVR

SEQ ID NO: 1563 - protein, 110 aa, Homo sapiens
HTSWETRTRYRPRSVSWRRSGHHCFRPLKNASRSGWPVSAPRSRSTGACWMAQVWWAMPRKYLRKQTSLALCKPPSSCTTGLPEPLKPSRHSGQLPAPPSAIASSTWDVR

SEQ ID NO: 1564 - protein, 53 aa, Homo sapiens
SYHCHLGLFQDSGRIRKHSSIYTLKNFLDIMIPWMLVTWMKKAICMLCLEWMM

SEQ ID NO: 1565 - protein, 51 aa, Homo sapiens
VKTKKSVGFWPCPKTCSHIFNSKDRKISEGERVAICTLLNSEVNNPVLSFV

SEQ ID NO: 1566 - protein, 56 aa, Homo sapiens
KEQKIVAIFPSFFLPKDMTMYLQKNRYKGREISKYENYSQMVLVFIMQECFGRTEI

SEQ ID NO: 1567 - protein, 145 aa, Homo sapiens
NPFRPSQRWTAPALLHHRPTTAPPSAHRSRCTEPVGIPTLLLQTLPASTPHPQAFRQPSDPPAKPPQIYYRVQHWTAIRQRGATIRKCRICPTLFSPSQPTTHSSLLISYVLKNPVPDQFFFSLTPDAMRSQGHYHLFINCKNFC

SEQ ID NO: 1568 - protein, 88 aa, Homo sapiens
GELGRSAGRSTSDCFFKTFMTATCVTLFWWPRVKKICGAVRLPSTPVSGHHCPVMIMLLMRAVRPVGTWQPQCSLSLAISPVTLCGEL

SEQ ID NO: 1569 - protein, 151 aa, Homo sapiens
TAGRMKWSLGGNPPSVVEVARSWATSWTSMTRKSWTGMRSISSPSPPGSARSVTFMKATSMSSVPGLPTGQVLASCRHPAACLSAKSGQCPSQAPRTMYGHPRCGPHPWCCSGNPHCIWGLGLSQAITSVSRRKALSSGSRSPQAPSLAPT

SEQ ID NO: 1570 - protein, 68 aa, Homo sapiens
IQHTQIQDDSSCDKQRYHLSDCLCPYRGGYDSLRSVCTRTAKIWCEGWPDKLCCSILYWPAAGPQASQ

SEQ ID NO: 1571 - protein, 24 aa, Homo sapiens
NRSRKKKKAKNGCKQDNSLYRGLL

SEQ ID NO: 1572 - protein, 40 aa, Homo sapiens
TSSLKKSRKTRVQMSVGIFQSMFSTVTPLAKPKKRFSKHS

SEQ ID NO: 1573 - protein, 139 aa, Homo sapiens
GAPVGRRRRKQQRQQMRMKMVAQRRSTGNVKRQAVRQHVLCALQVLLKDVPKMATPPDGIISPVGNISVMNALTITTEAIRMDMTNILHGKKYGLAMAKPNLVPKLSWQTSNSPTGFSVQNLSVENGGSLPRKSSLLHR

SEQ ID NO: 1574 - protein, 103 aa, Homo sapiens
AAYPPATSCCPPTRCRGQAWRRRQRGQWVSRDGTGVPVHPPRPSRACPPSTSPTLTCCTLRTAAGQPRPLGPAVGRSHLRSLSSARSLTAKPQRAAWTWCPAG

SEQ ID NO: 1575 - protein, 59 aa, Homo sapiens
VVNFYIIVIKRLWVMVKVHMILPVTKHCRTSRLMISQTLQAKQPTRRIQLSLTEMQKRN

SEQ ID NO: 1576 - protein, 192 aa, Homo sapiens
VTPAGTGVQEMKSENSLQLQPLVLLLWWLHLIHHLHPRVRTPQEERLKNAKIAMMRNQTGTDLGGENVLFQPCLKLLYHLERKKNKKKTKMIWGLTDSQHSQMIPALDSVHKLRWLRIFWTNTGMPLNGPAPVMEQWQTMKVQRLWVMVKVHMILPVTKHCRTSRLMISQTLQAKQPTRRIQLSLTEMQKRN

SEQ ID NO: 1577 - protein, 165 aa, Homo sapiens
VTPAGTGVQEMKSENSLQLQPLVLLLWWLHLIHHLHPRVRTPQEERLKNAKIAMMRNQTGTDLGGENVLFQPCLKMIPALDSVHKLRWLRIFWTNTGMPLNGPAPVMEQWQTMKVQRLWVMVKVHMILPVTKHCRTSRLMISQTLQAKQPTRRIQLSLTEMQKRN

SEQ ID NO: 1578 - protein, 121 aa, Homo sapiens
PPALIQKKITITVQVAWQHSVVHPGLACLPCLLWMRYMNLSQRIVTWEVMAVKDFTVKKIQTLIMKMILLETVAMHHSLVQKSLKKGSQAKRCENRHVKKLMRSSKRQLDLCSTLLEFVHV

SEQ ID NO: 1579 - protein, 32 aa, Homo sapiens
RKTRAMKLLKMIKSRAKRELKKKRNLQTLRKK

SEQ ID NO: 1580 - protein, 70 aa, Homo sapiens
MMTMKLQRKKKMSYYWGEKIHQSKKRRKLKNRRILTKTQMKRKRKAKRGKKLKANVTLKERKMRKTWNPA

SEQ ID NO: 1581 - protein, 121 aa, Homo sapiens
VWGQLPASQFSDPSPGGLSARLSPCRIQVPQLFSGVWGCELHQVPHPDVALRGFPQVPHLPHGLQVWAKCPCPPLLPASQLPNSAGQADLQVRHVRHSLHSQTPPLLTLRPALAAPACQCL

SEQ ID NO: 1582 - protein, 64 aa, Homo sapiens
GPLAPRSITEGTSPCQTAPRGPESSLSQRRGHSASKTASWRYPQCAPGPGSALARRSVTLWCES

SEQ ID NO: 1583 - protein, 87 aa, Homo sapiens
PSAAPRSTALSGRQAMAVRRLALSPPPSTSRALCPPSLPCLTPLPWLPQPVIWSSMSTMSTMALLVPLKLSPVELIARKSCMRSAPF

SEQ ID NO: 1584 - protein, 80 aa, Homo sapiens
NPSGYECGKTRSKNAVPTSSKIQSCQGIHGRRRSAANHQVHFLRVCRGERPKPAVPKREGPQRALDHREPGVYAGGVASA

SEQ ID NO: 1585 - protein, 110 aa, Homo sapiens
VTESLAQDSPLATVNMDLAQVIPLPMGNMVLHQDSHRAVANMELAQVSLPATVSMALAQVSLLAMADRALDLASLQATASVGLGQGSLPAMADMGLAPVGLPAVANMGLA

SEQ ID NO: 1586 - protein, 110 aa, Homo sapiens
VTESLAQDSPLATVNMDLAQVIPLPMGNMVLHQDSHRAVANMELAQVSLPATVSMALAQVSLLAMADRALDLASLQATASVGLGQGSLPATADMGLAPVGLPAVANMGLA

SEQ ID NO: 1587 - protein, 110 aa, Homo sapiens
VTESLAQDSPLATVNMDLAQVIPLPMGNTVLHQDSHRAVANMELAQVSLPATVSMALAQVSLLAMADRALDLASLQATASVGLGQGSLPATADMGLAPVGLPAVANMGLA

SEQ ID NO: 1588 - protein, 87 aa, Homo sapiens
NRKQRKSDSRRSVKRNGSDRSVWSSTVGSPRPALPQMEMRAPHPALETQFRDSVVKKRTHWIYLALLCLWLCARLGIGPSVPAERRD

SEQ ID NO: 1589 - protein, 40 aa, Homo sapiens
DPLHQALEVHLPQECVHQDLSILLIHLSHFFPCNASCEIV

SEQ ID NO: 1590 - protein, 266 aa, Homo sapiens
QSHRGPPAAPPQRPPALPHAGPPGPQALPEKGLVIHHALSRLHLVATPGVKKDSEDEIQAPHLWGRSGPWGKSFRSTRATSQGLWNRSPLPSPPGPHSGATPLHHSPRQWLRPQCPAIPHGHPPPPPWGLQRTSQAFAEQPRGVVLPSPAKEGHQMPQQPQVPLSVHKLPQCLLSAPTTVTHRMAPAIVTLGLLLPLAPADLCLPALGSSRLPRGPPQLPSIPVSQPLPRGFLREHPQPHKLQPIPPGSQKALFLEPRRRLWPPSP

SEQ ID NO: 1591 - protein, 52 aa, Homo sapiens
APVAPALLQAPPGYLRAAPRLLPCVPAQLRTPATPTEALHGGRGGRRGHPRL

SEQ ID NO: 1592 - protein, 206 aa, Homo sapiens
SRWRPFVPVPNGSFWEATTKTYPQTDIFVTIPRIHLLGGSVMVPQIHLLGRTVMTPRIHLLGGPVMTPRILLPSEGLVMTQTHLLPGGSVMTPQTLHPQGGPVMILQILLPQGGLSIILQVTARKQLIQTFLLHGINKVQGTRILIQICHLHGIDLDTGALILTSLHQGGDRGPNLLILTCPRLEGVSLLERRLHTCILGLKLGWC

SEQ ID NO: 1593 - protein, 340 aa, Homo sapiens
SRWRPFVPVPNGSFWEATTKTYPQTDIFVTIPRIHLLGGSVMVPQIHLLGRTVMTPRIHLLGGPVMTPRILLPSEGLVMTQTHLLPGGSVMTPQTLHPQGGPVMILQILLPQGGLSIILQVHLLGESVMIHQIPLLLGEPVMVPQISLPPEGSITTPLTHLGGLLALQTHSNSEGPVMTPLIWLLMSLIPCPEPKVVKPQKEPLARLLHIGRSQEPPICHSQRTANMSMTLTSLLHEKSKQNPILETRSSLIPKVTARKQLIQTFLLHGINKVQGTRILIQICHLHGIDLDTGALILTSLHQGGDRGPNLLILTCPRLEGVSLLERRLHTCILGLKLGWC

SEQ ID NO: 1594 - protein, 167 aa, Homo sapiens
LDLLELWDFLDPPALQALWVHRGLQVCLDKWGRQGSREPQVEMVPVEKMETEGALVCQGHQVCLALSDLKENLAPRGPLDRLWSGSLEQRERREPLEALLETWWVSREPKVTEDCQGREARRVKLAVQGSPETLGKMVRKGLQDPKVSRVTQESGSRAPLGLLALQV

SEQ ID NO: 1595 - protein, 141 aa, Homo sapiens
CRTWARRSWRRRERMILGNMRGVGMRQAKGTDVGGHGYPTGTPTKGATNSVKDMARGSTNLKMVLDISENMLEIKSTVKALLYIQMDPDMKESGQMTCGTAMAYTTTSIMTPTLESGLLIKGMGKAPIYTRRRAVSMLAPG

SEQ ID NO: 1596 - protein, 103 aa, Homo sapiens
CRTWARRSWRRRERMILGGSTNLKMVLDISENMLEIKSTVKALLYIQMDPDMKESGQMTCGTAMAYTTTSIMTPTLESGLLIKGMGKAPIYTRRRAVSMLAPG

SEQ ID NO: 1597 - protein, 65 aa, Homo sapiens
LSLFLSHWKTMVPLLLVIFQSHCLPNHVEHSDLSMELLTLFSLSWQTTFQVTALMLRNNYIRSND

SEQ ID NO: 1598 - protein, 165 aa, Homo sapiens
TCASHYLPSAQRIHQMGRKAQLVNLPPVAHLKLAAPTLMSGQMSGLMTCAPRAQKSHWTHLLQRSSLALNPAPCPFHTRNFSESGALPILRTQTVTALNWTTPTALMPCGPQLPSLHESHSYSLYIEKYLYKLYIYTYIYIYAPHNQQKDGAVPAVSQARGRLIP

SEQ ID NO: 1599 - protein, 43 aa, Homo sapiens
TKFATMKKSPFPALPPNFTHIDLLQVTHLAVFARGPDAAFEIY

SEQ ID NO: 1600 - protein, 25 aa, Homo sapiens
LRLGACAGPWPAQALPSHGAPARPG

SEQ ID NO: 1601 - protein, 122 aa, Homo sapiens
PCFSSPWTCPPVRPWARGRSSGSCRGRRPGRPGCGVLGVDSQRGSRPRCGAPGRPEWSGSTGRCRCLEPDGPTGPGTRRPPSCPRQDWPSPQLLPNPALPSPLRPRPRPPRWPVGPRSSRPS

SEQ ID NO: 1602 - protein, 93 aa, Homo sapiens
ASFSSLSTSSASAAAGPPSPPGPRSPRPGEAASPGAALSPFSPAALALASVSMATVRPVMGCPSSALRCCTPTTHSAPLTTWCWRRWRGWARR

SEQ ID NO: 1603 - protein, 45 aa, Homo sapiens
SPPSSSPRRLGFPPVSTPKSQVTGQEVHGALRDARPAEFQERLAD

SEQ ID NO: 1604 - protein, 134 aa, Homo sapiens
EKLDWMVWMVKMETKDCLVLLERKGILEEGVIKDLEERKEKEEMLGFEGTRVTQDKTARREDPKEKPVTSAPWVSQGEMEYLEDLEKLGRMVALAEGDPPELRATRAVLASRALRESRGPEVHRAQLVLLVLQG

SEQ ID NO: 1605 - protein, 117 aa, Homo sapiens
LTSPTLPRAPWTMGVPGRWAAATTTGRGLGSRTPPTRTLPATILLREEFRKHPSSPTCDSGLGATRQESLPPPTFFLWLLFFFFFFRFFLPFPSFLFSLLRPALRFPVSPLVGKAFL

SEQ ID NO: 1606 - protein, 234 aa, Homo sapiens
GGGAARRRRRRRRRGRARGRRAGGRDKPPARAPGVRRGVRLPRAGGAVPRLHAAAGAGGHAEGAGRSQPAGGRAGAGRAAGRAGARARPGQGLTPGALRPLPGAARGNQRPVPAGAPAAAGRPAGAALQPHLRAALLSFRAGRPRPGFRRGRWGASDRRTRGLAAPFGHLRVLCLAARAQPAGHRLWARGGCVALAGHSHLGPRQAPTSLEDARCQCLALRRCEHVWGLCADSD

SEQ ID NO: 1607 - protein, 33 aa, Homo sapiens
VILRKGNSPRVSSTLSTCALRRMNPKGQSIKSF

SEQ ID NO: 1608 - protein, 245 aa, Homo sapiens
RRRLRTHLKSSPQSNPRPWQLARSLKKLRRRCPVGAPGLASWSGRPAWPWTAGSAHRPLAAPPRPPRTRANHVAAQGFRKSPTAPEAPRRSSGTWTPSGWPAPWNCGGARSWWPPPALVPCSASPWTSATDTGPQGPPSRPQRRGAPPSPRATSPSSSRPWPRLSLQQKPRTESEVRKSQLSRRRSQATHPPSQTQGCPRALRSTLNPRLRGFFCIKPRIKNTAWRAQRSWRMQCPGTWCWKPPP

SEQ ID NO: 1609 - protein, 136 aa, Homo sapiens
YLVKMLPLVESLDALLACETNMEKIEFLIPHCVNKELLDLESELRSLELLPLRKFSLQIIFSLHLIRLLMKLPSIAIALGIFLTVEASLSGPLGAVLVMGLSIILRVLKHFLPIAQESRWLYPEALSRPKDFFCHA

SEQ ID NO: 1610 - protein, 42 aa, Homo sapiens
KINYCLVQQMALLGYGIHKKNCHVFALTMEIKSMEYLHQLTL

SEQ ID NO: 1611 - protein, 222 aa, Homo sapiens
GRLSSQPWMFSSCGRPASKSTTSSTPRTRQLHAWSRCWNGAFTPCRLSASPATNATRWGMAAPRCWRMCSRPTMQPSKSMAPPPRRALPLPVVASAEPVRSASPARCQAWLRATRHPASPRRPPMRSAIPPASGVCPCSPCPPPAPPPLAPTLQPGRQALAWRGPLASLSWTLEKSLQSGGARSGSTTPCTALTPSRPSPRWLCLTSSTPATGSQQTWSPFC

SEQ ID NO: 1612 - protein, 216 aa, Homo sapiens
GRLSSQPWMFSSCGRPASKSTTSSTPRTRQLHAWSRCWNGAFTPCRLSASPATNATRWGMAAPRCWSRPCRETLSWSWRAAPWPLSPTGTASWKPVCLFPRPPGKTGPARAVPSRMCSRPTMQPSKSMAPPPRRALPLPVVASAEPVRSASPARCQAWLRATRHPASPRSLQSGGARSGSTTPCTALTPSRPSPRWLCLTSSTPATGSQQTWSPFC

SEQ ID NO: 1613 - protein, 167 aa, Homo sapiens
WQESKMSEFPPTTSVWWDYLGPRRKRASVGLESLVCATASCARVLTSFTWTIPPSSAPVTLEGEWSIMTTFSTGEKLAAPWRIVWNVRCTLWSRLNLLMIRLFNLIEARPCSPISRELLRPSLHQLKNSCTFALTSWGWSRTLSRNKCQTESCWLMVFFLVLMLAGA

SEQ ID NO: 1614 - protein, 65 aa, Homo sapiens
PAAQRSRGKTNYLTPLRGFTKVRVHIRQVLMVNDLSLPLGLPSISRQLALVFRIRTDIPPCLAIQ

SEQ ID NO: 1615 - protein, 70 aa, Homo sapiens
RTSPRVSALRAKDMRLAMPRSWPRPIIAMPGPSHATSLRSRMALVQCGPWRRSTLSAMCLSQAGSLSWMG

SEQ ID NO: 1616 - protein, 105 aa, Homo sapiens
RRRRGGVGRRGVRPGRVRPGGTGRRGGDGGRAAAARAALGELARALPGHLLQSQSARRAARMAQLRRRAAALPNAAAWHGPPHPQLPSVYSERAMPPGCPEPSQA

SEQ ID NO: 1617 - protein, 29 aa, Homo sapiens
RTAYFCQYHTASVYSERAMPPGCPEPSQA

SEQ ID NO: 1618 - protein, 42 aa, Homo sapiens
VSSKSGSQKSHITSPGLQESPSSINVSNVPLLAMRSHIFLIT

SEQ ID NO: 1619 - protein, 45 aa, Homo sapiens
SSCWKITPTPTWPPPPGTPPCTLQPVRAMWKQSWPFWKRKHPRPA

SEQ ID NO: 1620 - protein, 67 aa, Homo sapiens
PRPIVKNGKSHYSMKETSVSDWKKPSSSWRSSIITWRGPSEEPRCCRQTLLAMWVLVKISAALAKGT

SEQ ID NO: 1621 - protein, 62 aa, Homo sapiens
FNNNNNNNNRATKANGSNKRQTPQSVFELLSFISSFPINVSSLVNPFFFYPICTSWHCNRCL

SEQ ID NO: 1622 - protein, 60 aa, Homo sapiens
LTFRRKFKHCKRHALTYSCQLLVWVTVPPKNICQLLLQPQLLINTRPVQANLFLSLKILQ

SEQ ID NO: 1623 - protein, 92 aa, Homo sapiens
DAALWSSTWGGQSSAWVTPPASPPQLRGHAQMCRSHGTKGLTCGGMSSCKRQGMSVSPSGVMPRTHSSSCTPVAPQANPRVWFTQLGATCSM

SEQ ID NO: 1624 - protein, 68 aa, Homo sapiens
KRNPSVFSPRSHGTKGLTCGGMSSCKRQGMSVSPSGVMPRTHSSSCTPVAPQANPRVWFTQLGATCSM

SEQ ID NO: 1625 - protein, 225 aa, Homo sapiens
PVMTTTMALAAISSAAPEMTSLDTMPVTRMATKLAWKAGWAPNVTELFADKAAVLSMGLANSQVTAGASTAGKACTVISASHTRDASTASVMSPGSASVRPTGAASSVTKISITVGLISRVSTGELVATQALTNISVPALRGIQDPTVKLLSTPASLIPVTTEAAVRRPPWALSVSVPQAGPAPHALQTLMTVLLITVPTGAPARTWLTDLSVCAPHSGLGKRAS

SEQ ID NO: 1626 - protein, 43 aa, Homo sapiens
NHRGKGGLSGNLRRIYWKEKNLASHTKAPATSASSCCTRFFEN

SEQ ID NO: 1627 - protein, 58 aa, Homo sapiens
RILIRHFKLLLNLGRRQRMAYCSTVGRTNTGGGISCPWLSSDAPCSSGLIVELGLPSS

SEQ ID NO: 1628 - protein, 150 aa, Homo sapiens
GATAAAAPRVSPSTPSGPSVWMRMSVPCRPPPAGAPPVATLLVASAASAPLALTLIRPSGAARRWMSAPDGVAPVATAVPTRLVASCAAVLKATSGLGKGTVSPAWASAPDPRTPRTKRSCSRLKPATNARSMASPLGTGHDAVPTGTTR

SEQ ID NO: 1629 - protein, 59 aa, Homo sapiens
GKRCLRKDLQRNADLLPELTSVRKKNWILVNLFSGTSKAPFLCGGIDQTSQPSAGPRGT

SEQ ID NO: 1630 - protein, 39 aa, Homo sapiens
FRENEGGRSCFAKRTRQQQSSSAPGEATSSGSTCPTFGI

SEQ ID NO: 1631 - protein, 53 aa, Homo sapiens
QWHFCPSSSQPQLEVCLLVYWAPGFCRKLNIKIKMKKFKERLLCKFRGEKREC

SEQ ID NO: 1632 - protein, 193 aa, Homo sapiens
KPGPWKARWRSPRRRHTAAVIKSTGMWRDLKNKNLKHKDTMWMTAGGTELTTSLNGFPEGVRMSRDGGKDLAKTEGRRGARTAGLRGRPWRDWEERRGVTTVQHPEKSDWQTRTGQPCSCMIQELASERESVAETGGSARQKVRGLVLRRGKRQSESLHAPGLHGRARASQKRVNDPECDWEGELIPYQETGS

SEQ ID NO: 1633 - protein, 81 aa, Homo sapiens
TVRSSRSPWSGPWARCTWTAASPPCTTTPRAPPTSSTPRPPPTRRSTVRPASPTAPGLRLRRSAPTAWGVSPHSTACLRAR

SEQ ID NO: 1634 - protein, 85 aa, Homo sapiens
SFMTSGNRGMQEGGCGTTAFRPGTPFSSSSQSPTDGVSPKFQRPYFGSGLGGRTTTYPLSSLETRATWPAPGRYHWRRAATWPGR

SEQ ID NO: 1635 - protein, 158 aa, Homo sapiens
SARQAASPPTLSGTFWPASAQPRPRTSAWSDCAHMGPGTPRTAACSTHTSMIGSATGWPLWSTWGWSCCPCLPSSPCPPGCALWGAQAFGLFLSPLSFPQVWRSLTQVCCWLCCSPRKGFQTQQGPAPGWGRFKRWSPSTVRWRRDTISQMTGGRMCP

SEQ ID NO: 1636 - protein, 145 aa, Homo sapiens
SARQAASPPTLSGTFWPASAQPRPRTSAWSDCAHMGPGTPRTAACSTHTSMIGSATGWPLWSTWGWSCCPCLPSSPCPPGCALWGAQVWRSLTQVCCWLCCSPRKGFQTQQGPAPGWGRFKRWSPSTVRWRRDTISQMTGGRMCP

SEQ ID NO: 1637 - protein, 73 aa, Homo sapiens
GPRGKLGKKVYQDSLVFQGFSDLRESQESQGIRVYRAPQVSQGLGALVAPLDHLGFQAPKGSRASQGPLGSLV

SEQ ID NO: 1638 - protein, 74 aa, Homo sapiens
RPHQNVQEAAEEDGFPITVAGPAPPPLMCWNQRIQTVIGKQGLKRGERTMIKKKKRRKMKLRAPLKQILGVKHQ

SEQ ID NO: 1639 - protein, 132 aa, Homo sapiens
WSMKDVVVVVTGLAAMEPLTARRMMVGRTAAETTTTGTWTTVHILASMAARRASMTMTTHLRSRVRRIPTRPPRAPRLSVGGGGGTGTAPPARQASPETATIGTRTIGPSKGRRRRRRRMRRRRRRPVTSSC

SEQ ID NO: 1640 - protein, 145 aa, Homo sapiens
GGAPAAPEGPIRTWSMKDVVVVVTGLAAMEPLTARRMMVGRTAAETTTTGTWTTVHILASMAARRASMTMTTHLRSRVRRIPTRPPRAPRLSVGGGGGTGTAPPARQASPETATIGTRTIGPSKGRRRRRRRMRRRRRRPVTSSC

SEQ ID NO: 1641 - protein, 172 aa, Homo sapiens
RPRPSTLPPRCLPHGALGFLPSPMCLGAFQMMTLPPLTSASGLPLSVRRARQVLQNWALFQTPGSSQAFHPSLRAASPTHECTIQPPLLTPRQSPQACPSVCPPPLTTTPTCHHPTPALPKARVDPSRPAALHISTMALRQDPISFPWCRGETGLLPECFRHAPPPRMAARY

SEQ ID NO: 1642 - protein, 150 aa, Homo sapiens
RPRPSTLPPRCLPHGALGFLPSPMCLGAFQVLQNWALFQTPGSSQAFHPSLRAASPTHECTIQPPLLTPRQSPQACPSVCPPPLTTTPTCHHPTPALPKARVDPSRPAALHISTMALRQDPISFPWCRGETGLLPECFRHAPPPRMAARY

SEQ ID NO: 1643 - protein, 72 aa, Homo sapiens
MASGTSMVLALNLSHGLQPPPHRSPRLPRRSAPPDPPLSTPQSAPQLAPQVPPQLAPQVPPLLALLRPLLCL

SEQ ID NO: 1644 - protein, 30 aa, Homo sapiens
SGRIGMKASSSSCAPRLWPNYGAKRKRTAT

SEQ ID NO: 1645 - protein, 157 aa, Homo sapiens
PWAVSPSVPGQSGWTTATPCRGPLAGTLTPTPTSVRPEGPSVSSPWASSAVPRPSLVSPCGSWARSWNAAWTLAWSAGTVSRWGSSRCASTMKSVCSAATTATAPAPRPPALRPRPPPLQGRPGSSQSRPQQPLRPQPLDPRPSRPPPREQLPLPKC

SEQ ID NO: 1646 - protein, 51 aa, Homo sapiens
FHRLSATAGCGHRHVQRALFHTKEQPTLQQHQPAPRSVCSWAPRSRQMCCG

SEQ ID NO: 1647 - protein, 51 aa, Homo sapiens
PQVCRSKWKREKLHSDHHCLHKPTASRHLPQSHQNHSGWAPRTSKTSAETR

SEQ ID NO: 1648 - protein, 57 aa, Homo sapiens
CSPGAKELTSCTRAPSTVGGRSSEMRGARPSSRVRGPTSCGAWGAPSCWSCTTSSRR

SEQ ID NO: 1649 - protein, 219 aa, Homo sapiens
QVHRSRISLSAPIIKCGSSSRLMAVAVPWDSRLLMKRSSRAVAVTLAYLHMAGGKAPGFTTVTHSSLSASPPLSWWDRRQSHAKRITNGRLRSQAACSPASSTSPARLGLSCLPTTQRTMATTSTVSGSSWPGLRAASTWPSTTLTWSLSLISWSSRMGPPPRRPSWAPSQETSFPPPSQAVATWPVSSSRLTTPQGRGASTSLLPPSDTTSARILAFQ

SEQ ID NO: 1650 - protein, 28 aa, Homo sapiens
QKNEEERTGCPRGCPASAPTAPPVHHSP

SEQ ID NO: 1651 - protein, 78 aa, Homo sapiens
TSKSGALGLSPNAASTWPSRTRGPAWPWSLSGSSPTPALPCSDPLLPFQRRRPVGLGGPPWWQLWAPVWLMQSQRRME

SEQ ID NO: 1652 - protein, 122 aa, Homo sapiens
PAAFNPCPCPMTVQPLAPSATSQAGASPTTHGTHSRICSSASTSPSSPMPPAMVCIPGESRATWCVQAASRGRMPARVILGAPWCVGESFKVWCPGGLWGPVDKMASLESTPIFASMWTGSG

SEQ ID NO: 1653 - protein, 103 aa, Homo sapiens
PQVGPHSGSLQRQTHSRICSSASTSPSSPMPPAMVCIPGESRATWCVQAASRGRMPARVILGAPWCVGESFKVWCPGGLWGPVDKMASLESTPIFASMWTGSG

SEQ ID NO: 1654 - protein, 145 aa, Homo sapiens
PAAFNPCPCPMTVQPLAPSATSQAGASPTTHGTHSRICSSASTSPSSPMPPAMVCIPGESRATWCVQAASRGRMPARVILGAPWCVGESFKVWCPGGLWGPVDKMASLESTPIFATPLLLAWELLGTLTPASPSKTHERGERSVQ

SEQ ID NO: 1655 - protein, 66 aa, Homo sapiens
LHKSEKNFRSSKNSQNKDLVRDAVVVEILRTLKRNLAQAVMKLMRRKKRIIMNLMKMEMIILSMTL

SEQ ID NO: 1656 - protein, 35 aa, Homo sapiens
IQSHSQIIELITTFGACTIRGIIAQCLRSFMFSSL

SEQ ID NO: 1657 - protein, 36 aa, Homo sapiens
CAPFSEEYYMSGFFASIVLQSAQDEYNRGSHIWRSL

SEQ ID NO: 1658 - protein, 190 aa, Homo sapiens
GTSTRSATSTSSTATGPASTPSSTTISPGAASAGRSTCPSTFSPRRSASTSWARRPWRSSARTRASCGRRSGPCPAATSSARCGCSSSTPRAPGRPGASPSCPCWSSSSPLSSSAWRRCRSSATRRTTPPRRRRTHSKQPATARRGPAQEPPASPIPSSWWRRCASSGSPSNCWCGSSLVLAKPPSRETS

SEQ ID NO: 1659 - protein, 33 aa, Homo sapiens
NVGSPLHRPACSLGVGQGLLPAQHLEQTQTTHK

SEQ ID NO: 1660 - protein, 106 aa, Homo sapiens
QQEDQDNSPPPAARHPQRRGVKQAAGQSDHRSGRRPAQHPGRAAAQEDGESEDEEQMTLTPPSGSWLPQQRPFSWSSRNAFECAGCHGGPVTSSGEVGGEGPGGSQ

SEQ ID NO: 1661 - protein, 167 aa, Homo sapiens
DPGAGGQCGPRQQEDANHPPPPAAGHPQRRGAQQAAGRRDDRPGRRPAQHPGRAAAQEDQRHRGAEGALGRQEGHPGLPGVLRGPAPRPAARPPHATTKALLRATTALMERAEPLQTAGQAGRGSLPLPSPRPPSPPGLESPPAPAPVPHRLPRRPRALPCPPSALR

SEQ ID NO: 1662 - protein, 70 aa, Homo sapiens
PRSLKPQFSPRLWLPLSHRSNSRRLCTPSLLAHRFPRQQPALITESLPPPRWPAQKPIPSSQDLTYLCWK

SEQ ID NO: 1663 - protein, 36 aa, Homo sapiens
SILISGKPTLLTMPFSSAQLGILCFSELYLFHEQSM

SEQ ID NO: 1664 - protein, 117 aa, Homo sapiens
PDGLPKLPAPGQPGTRPGQPRQAGAQTPLPDASGVPCLPQDHPWGRQTASPHEDPHRREALCLRGLRCSIHQERQAEDPHAEAHGRAPLLMPALPSPLPAQLRPQEPHAPAHRGPAL

SEQ ID NO: 1665 - protein, 144 aa, Homo sapiens
PAGGASGTHQGGERLRCLSQLPECHPPGRPLPTLAPGRRAQAEAQGLSAVPHLPQSHHGGREAAAAHEDPYRGEAIHVHHLRGPLHQAGQAENPHAEAHRGAALPVHPLQRQVRAQLRPQEPHAHPHGRAALPVRVLLQELHAL

SEQ ID NO: 1666 - protein, 43 aa, Homo sapiens
ASIWFQGAGAPLCRKHEGQRVERSRATRNSQLLAQPPGHPDGV

SEQ ID NO: 1667 - protein, 83 aa, Homo sapiens
TALGRSPWNSSLFKQTPPLHHPSTRWSHTPAQPRCSLMNQRPQVGCPSSNTKLSGEQLVKKYGIPSGMMPRKPAWRASSPSWA

SEQ ID NO: 1668 - protein, 76 aa, Homo sapiens
WFQVRLHAARKGRPCLHQEWGYSHCWTSITDLSGMCPGPGSYCTNCSIQPAKQKNDYYRGFIAQPRSHLELFHFQP

SEQ ID NO: 1669 - protein, 108 aa, Homo sapiens
QYLKSLLCATDLVKLNQLGFKGHISLNTQAQHYITYVGKSQLLETLTVEHKTWKSVKCFHWQLAITPREFWEEMPHRSLAQQKEIVCPLQWRLEMLRMNMPERKSWHR

SEQ ID NO: 1670 - protein, 74 aa, Homo sapiens
WAKEILRSREAKCHHMHFLCKLVGRSIRRSTQMLQSTSQSFLRSAQRGGRPCLLKRKENLKIWQKRTRPVMKEK

SEQ ID NO: 1671 - protein, 139 aa, Homo sapiens
ARAPWCRPRAPARRVPSNSTRRRPLGKPSLRLKRQARPRPRSQQERRRSPRRRRGRPPPRRAPRRPQRRRRSRLQLLEPKKRKARKRRKQPSQKRRPRAQRRPKQLNPRRLNQRPPSPRQPSQRRRQPRKSRKFLWPTA

SEQ ID NO: 1672 - protein, 112 aa, Homo sapiens
WMLSPARAPRPRKQSPGARQPPLTRPTPGAGQRLLRVLQTPGHRLVPSQLPPLTHGGCPLEPPYNLSPRTRTPGQLHSSLPPVLGKELLTRGAQSPPPSPCLSLGPLSSSVI

SEQ ID NO: 1673 - protein, 66 aa, Homo sapiens
QHSTECSGTTETAKPQCCQGNSPQESNAGFGNLPPWLPRQITDEPMDSVAQVLFPSCLVSTDMQRS

SEQ ID NO: 1674 - protein, 73 aa, Homo sapiens
RLLQGWAERHGRVQNEPPRRECSHGLPREAEPHRLHADEPDLRRPVRPLQQGSLQRTGKTLPARAKPHSLQAC

SEQ ID NO: 1675 - protein, 47 aa, Homo sapiens
RASTSGKRWRRAACPSSTTDPRGPPKVPARCRRRRARMSAGAARRRL

SEQ ID NO: 1676 - protein, 68 aa, Homo sapiens
VWPWPLPVDPLFRLGFGPDGRWGGSVRGEFCPAQCREGHVSVQFQKRNARDDSLLGNDGGRLHPGRPG

SEQ ID NO: 1677 - protein, 34 aa, Homo sapiens
GLGTQGCPGWEGARGEQGSLQPPEVQKGSVYLPP

SEQ ID NO: 1678 - protein, 46 aa, Homo sapiens
GISSHPCPGPAAGSPASSPWATWTTRSSCGSTATPRARGWSRGRRG

SEQ ID NO: 1679 - protein, 125 aa, Homo sapiens
TPLDWSGWPKRRPSTGHGRLSQFRSRDCGLMSMRLGSCSAKECPQLTTAPSTTTPCDPAEVMSSAPVRPRCCNCIQRTGQQWPPWGKASAVASSWTGPTSTQNRGARLQTVATWCGQGKRTCCSQ

SEQ ID NO: 1680 - protein, 101 aa, Homo sapiens
MALLDPVLISHIILCHLEADWELSLQLHNPLILMPGIKIQPLIQWQVILTTLGHHQLPLWKEKMTQCRMPREARLSGRKRRLWVKWQLLPQFSTPILISPT

SEQ ID NO: 1681 - protein, 103 aa, Homo sapiens
SGQWHGGLRLWRGLRGPAMPGPQPVPQHPLQERRDMPRGGPQRRGRLCLQLCPGLLWAPLPDTPGQCLPHQPLPQRGHLRPAHADGVQVPLPARLVREIVPAG

SEQ ID NO: 1682 - protein, 108 aa, Homo sapiens
FPNLKLRKKKRKGINHHHLPPPHLVTQIAQVILSPLLIPLIPKVLLKRNQRKEKRNIGKIPENTRKKRKSERKARRVHLVRVKLKILKHNPSLLSVQKRSLLYLKIDS

SEQ ID NO: 1683 - protein, 127 aa, Homo sapiens
NLQITSGLYPGRSPACALKFWRTVKTVSAGDTQAWAKLSLLGALQSASLRLSLWLEPSLQSISFHLWKNVINGWYLSFQRLLLTLAMTQTNQTKVYLMPQQTPWAVARRWCNGPSLTGTEQAWICQP

SEQ ID NO: 1684 - protein, 216 aa, Homo sapiens
PSLPPWPRAEWLTSLSGRAGASRVTHLLPWNQPFPPIQTSARANKRLALQQEWLSSLPSRKPSSEHGLRWMARTPLMTPMMRTLLGEWTQTWLGSCPWGRTSRTCSPATGSPGLCARAPWSLRATAHRPCPQTPCALVCAAWRMGCWAPRPGWPPSCWAMSCFSPNCPPAGKVPSAAWAHWRPRTHSTTRPSQSPAFPPRRRSQPPARTASHSAHH

SEQ ID NO: 1685 - protein, 126 aa, Homo sapiens
RTRQGSSCSESSLPGESPLAPSGQWPRTPPPGQPCLRGSGGPCSYGVLGESARRRGAAGTLPHTPPTPASPSRSPRALAPAASASLCISTAGPVTPSSTPSASISSRSQRVEGARTHPHCCCRSRC

SEQ ID NO: 1686 - protein, 157 aa, Homo sapiens
HLSSCPSSRKGSSGWRRRSSSGSLTSSPLATRSRRPATCRASTQRGCSAIRGRCLGPGSRASQQEAAGTTAAFPATPNSGCGSQNRVRCTLPSCRDPGCTRRTGQAGPGHWWVTVILRGAQRASRASTTRLWVCTSGRSQRVEGARTHPHCCCRSRC

SEQ ID NO: 1687 - protein, 87 aa, Homo sapiens
RWQTRRTAHPASHLSSSTTRSTVATPQLETCWRPSSCCRLDQQGRLTCPPSMARWTWTEVPSCPCPWASGPCSASTEWRCCSGAYGT

SEQ ID NO: 1688 - protein, 110 aa, Homo sapiens
QAHPEGLGTSLLVAPCLPYARHTWGTAMALTRPWHSWWGCWLLPRHSAGRRRSPTCWPCCGASVRISRKLRMPASLSSASCCPSFCPRQPCPLNATGICRPGWHASWEAS

SEQ ID NO: 1689 - protein, 43 aa, Homo sapiens
SSWSPPRCASSWCVWASFCLPSPSCTPGITRGPRWLSPCWCSP

SEQ ID NO: 1690 - protein, 20 aa, Homo sapiens
GVHWGASFGPTDSTQPFSVQ

SEQ ID NO: 1691 - protein, 65 aa, Homo sapiens
TGFWSGATQTSQCLCHPGGRSSLGPTCPSQTSTSCGNWRRRRSWCSHHHDAWVASGWCAMTTDSL

SEQ ID NO: 1692 - protein, 67 aa, Homo sapiens
RNRAHWVREPWLPCPCLVACCPPATRTLPSPSSHLMPLSYLRTRRRQASHLSVEVQQRLSMTAQSQR

SEQ ID NO: 1693 - protein, 34 aa, Homo sapiens
QLYTKRLFISLEKKFSASKWFLTWMQLLVLHTQI

SEQ ID NO: 1694 - protein, 93 aa, Homo sapiens
SGRTAASRTAAPPGRRRPSGSRQWPCRLRKRRRRRQQRRPPPPPRNSNSNSSSSSSNSSSSSSSSSSNNSSTTLMVPASLRCWRPRLAWSATA

SEQ ID NO: 1695 - protein, 14 aa, Homo sapiens
KSVSASLSPAKYTL

SEQ ID NO: 1696 - protein, 72 aa, Homo sapiens
PHSKPWTVSSRAAISSWCRCRMEGAHPAAPQALCMLQCLTSTTTAPRSCRLQELLVGASLYRYQTACLREHW

SEQ ID NO: 1697 - protein, 56 aa, Homo sapiens
STTSSPWRGAAAPSMGTSWCRGTARRSHSQRTGRGPPSPRQRCASPAVAPSRVACS

SEQ ID NO: 1698 - protein, 139 aa, Homo sapiens
VMTLTLGPWRVCRIWKKSGKRRRRGRMRSRDRGRAHRRRLRRTTLTLRWRQCSGWSARPFRRRSCGASASMIPLMGPWTSTSCQGQLLPTWASPGMERLPASRFLPTWPSSPSPATSPHSPSSWASWTPTGMPSLTMKP

SEQ ID NO: 1699 - protein, 94 aa, Homo sapiens
CLLGLALHAPLESLHLEQLGIGPHASQPRRQLPAETHLQRRSFHLLSHPRASSLTLQPSAMQPWQDPLYPQGQSQGQVWSPASPHLQFPPVLLS

SEQ ID NO: 1700 - protein, 36 aa, Homo sapiens
RLCTRCWKTDALKTIPPPTKRSASWASPTGPLTLPR

SEQ ID NO: 1701 - protein, 67 aa, Homo sapiens
IRILQSTPTTCLISTLWGGSWGWLCSMDTTSTGASQCPSTSSCWGSPSSSQIWNLWTQSCIRAWCGS

SEQ ID NO: 1702 - protein, 188 aa, Homo sapiens
CMRGNSRDSVMAVTTGGGTRSLTRHLSIHRRVTPVAVITDMKRCETPEILHHQIKCCGDLIVLKTNTVTAQVTVRPKMCILTELERGMVGPVTLHKKIHTTTVLFIVQIHILLIQAITQAKLQMHLMILQMTGLSILALLGKSTTTIVEQKFHNGKNQKSGLKENRDKKKQTRWQSTASQKIGITEER

SEQ ID NO: 1703 - protein, 145 aa, Homo sapiens
CETPEILHHQIKCCGDLIVLKTNTVTAQVTVRPKMCILTELERGMVGPVTLHKKIHTTTVLFIVQIHILLIQAITQAKLQMHLMILQMTGLSILALLGKSTTTIVEQKFHNGKNQKSGLKENRDKKKQTRWQSTASQKIGITEER

SEQ ID NO: 1704 - protein, 16 aa, Homo sapiens
HRPPWASRIWSCWSHW

SEQ ID NO: 1705 - protein, 48 aa, Homo sapiens
RRPCGSWDCSSSSSLLGSSFSPARSTLPRQTTPLQVSAASRMPSGGQW

SEQ ID NO: 1706 - protein, 46 aa, Homo sapiens
GSWGCSSSSSSSGSSSSPVPSTSQRLTMTIRFFPASRMPSGGQWLQ

SEQ ID NO: 1707 - protein, 51 aa, Homo sapiens
CARRSGPLTPASSCGAAILTTPTFARPRRGPPWTGLCVHLASIVLKDTASG

SEQ ID NO: 1708 - protein, 195 aa, Homo sapiens
LMRPATCSAWSMTVRGMAVQMRPAWAASWRPWCRLPSTASIGPAAASWSSAATSPPTTASSMTPLILPGPSPQSCLGSTTQWMSSAALTLAVATRPAWHSGPLSPASSCGAAILTTRTSARPRRGPRWMGLSVHPASGASKVTASGSRRSRHMARMEAGAPGPSLGHVRGHVGAGCDPAAGAATTPPQPMEAACA

SEQ ID NO: 1709 - protein, 81 aa, Homo sapiens
WSARCTQAVCVYSIATSPRILPAGNLVPSAVKPPKPRRCSRSSSPAPAWELTTTPAPSIPLGRDPSPASSGSFSKSPSTAG

SEQ ID NO: 1710 - protein, 164 aa, Homo sapiens
CCSGGRPCCCARSACPWPRSAPPRHLPRIKPGSLRLLQQPPSPAGGRGRRCRSEPSLPATRTPWRSGAGARGWCRTSTNSTPAAARWATSSTRAAGGSSWTWSEMVRWALLASCPQEAGRVRPGATGATASIGAQWTVVPALWLSLTSVGVSTASSRSSTRATP

SEQ ID NO: 1711 - protein, 107 aa, Homo sapiens
GTSTSSTATGPASTPSSTTTSLGAACGGRSTCPWTFSWRRSASTSWGTRPWRPSGRTRAACPKVARTRSRCPPSPSSARCGCSLSTQRALGRPGASPSSPCWSFSSP

SEQ ID NO: 1712 - protein, 197 aa, Homo sapiens
GTSTSSTATGPASTVSSTTTSPGAACGGRSTSPWTCSRTRYASTSWGTRPWSASARMRASLKKRRSPCPATSSSARCGLSSSIRRALGPRGPSPSSRSWLSSSPSSPSAWRPCLSSGMNVSCSATLRRPTSLPRPPLGPTAAGSWPRPLALRWHRSCPGPWPTPSSSWRPRASSGSPSSCSCASSPAPARQGSPGTS

SEQ ID NO: 1713 - protein, 95 aa, Homo sapiens
HTGLSKKSPATTSHVHHSGWLWTGLSVLQNVVQDSSIGLFCARAVTFLRHSQLHNVQRKANLLSASAAVWAAALLLAGSQETGASVLLSVALDSR

SEQ ID NO: 1714 - protein, 63 aa, Homo sapiens
KKIQSWISTWNHGLKRLWRSLARKECLILPMSCASCLQKISQICLLGEVLLASVMLLKLFIVD

SEQ ID NO: 1715 - protein, 228 aa, Homo sapiens
SACLCASASRIITGRARPLSVCQLPVDTQATLSTASLRVTSLTSTMWSSLFATLGIWLRGLLGPNAWPAGNGVTCCPPAESSTVQILDTKKIVFVRSTPAARTGSASAPLCLTGATTASTSWAPQCSAAREMAHGTVPAPSVSWCPVAIRAPRLTPRCLETVILWEQWCGTAASASVLWWETAPACVGWMDTGLAPSLTAQEPAWEFAVTLGSRLMASVWGTALIQAL

SEQ ID NO: 1716 - protein, 107 aa, Homo sapiens
SACLCASASRIITGRARPLSVCWCPVAIRAPRLTPRCLETVILWEQWCGTAASASVLWWETAPACVGWMDTGLAPSLTAQEPAWEFAVTLGSRLMASVWGTALIQAL

SEQ ID NO: 1717 - protein, 46 aa, Homo sapiens
KTNKKAQKRQKGKKEKKERKRESRPGGTGRATILFVTQTQDSKGKG

SEQ ID NO: 1718 - protein, 118 aa, Homo sapiens
CIKTAIIFLQLYQRFFVGKRFLAGSIDLPTSAPVYPFYRVASRRSGSRPQPCSLVSAKNSRMNWRKQRMLPHPLPWQALQQAPDPGATLNYKCLQSHTFRTVSGSRISLEKSKQRSIL

SEQ ID NO: 1719 - protein, 81 aa, Homo sapiens
WFLEAFVIMVITAIPSSLLIRMKTSGRKMSTLGCPASWMVYKYATCIFRTMYWMRSGVATNDILLPKKRGKQSICLHRVIN

SEQ ID NO: 1720 - protein, 78 aa, Homo sapiens
HQDSVGLTSPTSAMRLRCTRRGRDTLPCTLSTSSTPWSASSQGLPKRARSCPRKNRKWLRFMSRATPWWAGCWSTRRP

SEQ ID NO: 1721 - protein, 305 aa, Homo sapiens
SIMGSITGPTRREVRQGSLARESTMLQGRLEMRLGGLARESTMLQGRPEMRLGGLARESTMLQGRPEMRLGDLARGPTMVSVRAGRRQRSLARGSTMLPVRLGRRQRSLARGPTMLRGRPEMRQGDLARGSTMVSVRAGRRQRSLARGSTILLVRLGRRQRSLARGPTMLRGRPEMRQGDLARGPTMLRGRPEMRLGGLARGSTMVSVRAGRRQRSLARGSTMLPVSLGRKQRSSAMGSTMGLMRPGRKQRSLARVSTMLPRRWGRRKTEWSKASIMALVRLEGRRGSLATTFTTQQGRLGKRET

SEQ ID NO: 1722 - protein, 143 aa, Homo sapiens
RVCASSTWRSWRHCCETRPWTSRSSTWCVIPARWRVHGSARATASSVRAYRWCAAETRELTACPSWRPRATSLAPRRRAWAAPQTTTLWALWRSSAIVWLRRCRQPCSPLTGCRATTWWCGTRTWWETPSRHYGECTILWDCW

SEQ ID NO: 1723 - protein, 54 aa, Homo sapiens
WALGAAASRRCCCCCRSPLGSARSRSPATLALTPRATRSRCPGATWREAASWAE

SEQ ID NO: 1724 - protein, 54 aa, Homo sapiens
SGRRPQRERWLLSGVPATPQDSSCDGVSWTRKASPTGSPPPTSAVFPLTTETSR

SEQ ID NO: 1725 - protein, 66 aa, Homo sapiens
TSGWAMKTLKTNIHWWKMMKICPIMMRRHGMLEAATETKLKTCCEGSEMALFLSGRAVNRAAMPAL

SEQ ID NO: 1726 - protein, 40 aa, Homo sapiens
RAPYALCSGWRVAGAHWAVPVPGRLREGGGCLPGLLAWIF

SEQ ID NO: 1727 - protein, 95 aa, Homo sapiens
KAGPPGPACAVCPTLSHTGKHGTSAEPEAGSRGAEYTTVSRAAAPPPHRGQGAPWFPGPPPQAGVHPQPGSGVPAPADTLAVPYREDRGAFPAPG

SEQ ID NO: 1728 - protein, 124 aa, Homo sapiens
PESQCRSQCDQPGGWAPTELLPSSSQLLPKPPVPAPFLPGSGLGAAPSSAAQLPQLPALCYADPFTPCTLHPAHCCPGAGIQGSTGVPYRTGNQENAVRRRWNWGVLSGRDKQKTQSRWTEKLL

SEQ ID NO: 1729 - protein, 95 aa, Homo sapiens
PPGPGCAAGRGAGGAGPADSWLASCACPIPGPAALLCNHLLGPRGQCPRQAVGPHCERWRAAEPPACLQCLELAHHWGPKPGPGAVTARAAADGP

SEQ ID NO: 1730 - protein, 79 aa, Homo sapiens
CPLPPCLIPRPLQSCRSRLIISTLRAILTTTSHLPVLIVSRTTLVLSCPVLITAVVLISDISLHTHSQRLPVREGPQKG

SEQ ID NO: 1731 - protein, 61 aa, Homo sapiens
CRSRTAPARTTRRCRCCGTRRSRWPCPWCTRWWRRSASRATSSLCGCCAGAWGPDPRRSSS

SEQ ID NO: 1732 - protein, 36 aa, Homo sapiens
GSSRLARPMKPVSVMAGKTPSPPLHPAWICSSQLPT

SEQ ID NO: 1733 - protein, 187 aa, Homo sapiens
PGAGATGLGAPWSGLRPWPRPHRHWLPAPRSSMASLAPTQPEAHALPSPLHRRPCTYSGCAPNLKPGPGVAWSRWPRSQAAAPCEAAAPQTQRPTSASTPTLGAGAGPGAEPLAPSGQMGPPPTKRTVPRPSAGPLPSPVCSEDCHCPGMGRSPLTCYLGRPGCFYWSIPLGVGAWPGSGVRTTCFP

SEQ ID NO: 1734 - protein, 170 aa, Homo sapiens
WPRPHRHWLPAPRSSMASLAPTQPEAHALPSPLHRRPCTYSGCAPNLKPGPGVAWSRWPRSQAAAPCEAAAPQTQRPTSASTPTLGAGAGPGAEPLAPSGQMGPPPTKRTVPRPSAGPLPSPVCSEDCHCPGMGRSPLTCYLGRPGCFYWSIPLGVGAWPGSGVRTTCFP

SEQ ID NO: 1735 - protein, 146 aa, Homo sapiens
MDTLKQRSSRTRPCTYSGCAPNLKPGPGVAWSRWPRSQAAAPCEAAAPQTQRPTSASTPTLGAGAGPGAEPLAPSGQMGPPPTKRTVPRPSAGPLPSPVCSEDCHCPGMGRSPLTCYLGRPGCFYWSIPLGVGAWPGSGVRTTCFP

SEQ ID NO: 1736 - protein, 47 aa, Homo sapiens
QVIWEPRYALTVKPVGSGRKLMNQAWTRTKIQCQLLLNIRSVLLCVF

SEQ ID NO: 1737 - protein, 117 aa, Homo sapiens
LCLAPKTAVYPCDSLDVFLSSSSFYMAMTKTLYCWEIPGAVKRLGPGPVQHSTTSFTHSLMTREAGVKSESFIFWNRYALTVKPVGSGRKLMNQAWTRTKIQCQLLLNIRSVLLCVF

SEQ ID NO: 1738 - protein, 59 aa, Homo sapiens
VPRPLTTRCLPSSTACSSCPPQRVLPSWTSTWTGWPPPGGLLTTTPLSLAWTWASSRSC

SEQ ID NO: 1739 - protein, 80 aa, Homo sapiens
PQDSLYQELLQTTRWFIQLFLHHQLRLPCEELLCRLLLFGRSIPKIVRDFSCIWPQDTCSSLQHLVGMAYNNVKFCKNFL

SEQ ID NO: 1740 - protein, 61 aa, Homo sapiens
MQLEAKVVVIPLHLQHELSIYRLSCVTFHKVVYRIKLNYFLVLRRRGAYQFPQSLPPGRVP

SEQ ID NO: 1741 - protein, 39 aa, Homo sapiens
NAAHRSEGQPRRLVAFPWHTPAPIWSLCPCAPHDKAPSI

SEQ ID NO: 1742 - protein, 118 aa, Homo sapiens
RSCTRHWRPPSRRSGRPAHTWRRLRTRTGWSWCGTKCGRSRSWAGGWRPWSRSGRAWRTQRACGSSRCRSYSSTCSCLWTRTTPSSRSSASSLRRSPRTSRTPLTSLLCAPTLPTGTS

SEQ ID NO: 1743 - protein, 70 aa, Homo sapiens
QRSCRRRQRSWRRRSQACRRRLLSCRRRRRSWSSCWWLTAQCARLAPRSADRPQPLGCSPCAVGVARWAL

SEQ ID NO: 1744 - protein, 27 aa, Homo sapiens
PDEFFPVFFFICCINWSKGAFCCIWFL

SEQ ID NO: 1745 - protein, 243 aa, Homo sapiens
LNGPWGASSLLALRAWSHQKKRRIPTKKCTRTCGWNLRQLPTHHLHQPKSPGRAQRRSPRSRRLLMSAQESGWCTRCGRSAGTLRTSASPVGASMLPWNTPSSLEECAKTARTAFWSVRTSTTTTATSPTAPSAVGAVRCSCAETTTAAGAFAWSVWTSWWGRGLPRQPLRKTPGTATCAGTRVPTGCCGGERTGPPGSRCSSLITTTRNLTLQRFTHLSQLRRGSPSGCCLSLMESLQGSWC

SEQ ID NO: 1746 - protein, 30 aa, Homo sapiens
PSIHFLRGQSHYSSWPSRCCSLSSGTSRTR

SEQ ID NO: 1747 - protein, 83 aa, Homo sapiens
LASSQIQHLLKRCQTVVKIYRGPESHGSRPSQKFLALVGRSCGSFLSGRGNHCEFPTTLPIMSKQMDGGHRWVLHAGNALQVL

SEQ ID NO: 1748 - protein, 114 aa, Homo sapiens
STITFVPYLKGSLPLPMNLDAKTKTESIKPFYMELPGNALWGSQNPTTLYCKLSRNQNRTTSKFWKNKLQSVSCEGKSFTTLRHQRMLLRTVGNKDISFCVCFCSPFPSVNGGL

SEQ ID NO: 1749 - protein, 31 aa, Homo sapiens
RRCWTRRRCAGGPSRSSRRRSCEGSPTGRPT

SEQ ID NO: 1750 - protein, 28 aa, Homo sapiens
KNRRKAERTGRNRTQIQQCERERRTRNC

SEQ ID NO: 1751 - protein, 49 aa, Homo sapiens
RIKFQIFGLFFQGYSVCETRKELFRSKSYLSSSYYLPQDFGCQLSNSSV

SEQ ID NO: 1752 - protein, 46 aa, Homo sapiens
MSGVRRTLHLRLNPEVPRECSRQRKTRIFCEWEDLGSEPRTEREVL

SEQ ID NO: 1753 - protein, 86 aa, Homo sapiens
MIQTPTKTVLWIRIIQSHTHYLRILKKIIESQVYPQTVKLVWTEVLVNHHQQMGYPKSTMMEKRKMTFRLVVLCFLSALNLKHGQF

SEQ ID NO: 1754 - protein, 48 aa, Homo sapiens
KPQHPHWCCPQKSWPCPCSALPQPPGSQPCCHLCCQCFRKNCLRRKRR

SEQ ID NO: 1755 - protein, 46 aa, Homo sapiens
KEKKQGCLSQLQQHHRQHSGKLQLTQHCFSKPRLCKDGEQRRLFRA

SEQ ID NO: 1756 - protein, 40 aa, Homo sapiens
SIWSPIGQRAIRITFLCFSLWMILKNKKMSTFYKMPSIPF

SEQ ID NO: 1757 - protein, 33 aa, Homo sapiens
LGRKFHLWMEYWEVIFKRKRNCGESVSLLQQLT

SEQ ID NO: 1758 - protein, 32 aa, Homo sapiens
DMMWESSQSSFLDLMTICGLTRPESSLTWRVT

SEQ ID NO: 1759 - protein, 50 aa, Homo sapiens
SPGPLFHPGPQCRPFPAETGLGNPQQTQHPGQQCGPDSGHTPLQPPGEVV

SEQ ID NO: 1760 - protein, 21 aa, Homo sapiens
NSVFCGYLSLCVFSLEIHLCS

SEQ ID NO: 1761 - protein, 70 aa, Homo sapiens
RKLVLLLKMETLVPDIIIQTIFLMVRESGHLEIVHMKTTDIMNTTMISSKECHRIRGGMLQVLGELLLHL

SEQ ID NO: 1762 - protein, 56 aa, Homo sapiens
TLGCFPDTCISKPLLLLPILPAPCFFPLATLFFLSLLPPPCTKCIKDGKTTAARSL

SEQ ID NO: 1763 - protein, 27 aa, Homo sapiens
QINILQSHHRKKQVCILTKSQNWKWKA

SEQ ID NO: 1764 - protein, 96 aa, Homo sapiens
GADRTPSLPVSTTSTAPGPHARGREIPPSVARSVSLATARPTNRTSTTDTIPTASPIARRTSWPRSTKTAPWRELSLCIRTSCSTSQECTNTSPER

SEQ ID NO: 1765 - protein, 29 aa, Homo sapiens
TMGHSNGKKSCKRRKSQRTCLCRTFEEVQ

SEQ ID NO: 1766 - protein, 106 aa, Homo sapiens
CGWLWLAAATASWIRSMRRWRWQSGAARGLSTSCCAAATSRRCATRRIYAAWPCRPSIVTCKPSTGITLERKRLQFSRSSLGETMKPQIICKSYPMVAGWHQTFII

SEQ ID NO: 1767 - protein, 40 aa, Homo sapiens
LSLEKVQEQLQLACICFLLEAIHCSPEPFCKVDPLMLLGR

SEQ ID NO: 1768 - protein, 47 aa, Homo sapiens
LEAEGGSELHATAAGSGGPFFYQCLCLCSETTNGHSQFRRHIYQGRQ

SEQ ID NO: 1769 - protein, 107 aa, Homo sapiens
TLYGMRDLNGTSRASPWTRALSFMWWSKTMRRWGGTGSWGKPRSHSERSSPPLVCPPASMPPCWTPRSSPQGPRWSCRCPTHRCLELCPCSRPLLLWSPPRLCLTWM

SEQ ID NO: 1770 - protein, 46 aa, Homo sapiens
KKKRNEKMIMMRRRKILIFLKILILMKMKGDCLEVKNLSQVKVPEI

SEQ ID NO: 1771 - protein, 33 aa, Homo sapiens
EQDYVKREQNTDLFFRLYLCLFKKKVMGLFIVV

SEQ ID NO: 1772 - protein, 47 aa, Homo sapiens
QRSHRFHRPRPGARAPCLPGPPRRTCLGPPNERKGRQGMSLPPQGKR

SEQ ID NO: 1773 - protein, 56 aa, Homo sapiens [sequence omitted]

SEQ ID NO: 1774 - protein, 65 aa, Homo sapiens
VTVMEFLRRKLGRTGQKGIEKSPTIIMNKEEMSVMNIFFMNMPHMGVIGLSLKRKCLLNGPRSTG

SEQ ID NO: 1775 - protein, 82 aa, Homo sapiens
TASPRTRLVGSPPRCGRPALTPRRCLPPHPRPACLATSTRPWSSWGPASRARGETRLQNPSCWFRPLGPSRWCLPFPSAASQ

SEQ ID NO: 1776 - protein, 36 aa, Homo sapiens
VFSVSHEHMLISQRSRTCLPSTWPFKNRRQLEIHWT

SEQ ID NO: 1777 - protein, 218 aa, Homo sapiens
AGRRGHVSLRIASTSSHFRSHHSPFSIEGTESRCEKYHLSRSRSPESPPCRFIHRRSLPGLVFQSPSLVLTEQEPELLQTSKQKPNWSKHRGQQLPLPPQLLQPPQLEGPFQDLAQGVDKVQERVVKGRLLEEAVQAQTESVKLERAPHWNWQELEAGEVRESFYPVVQRLSPSLRPRPPQARHSLIVSLEHNYSKPPQCLQHLPSVEHAQVSHHQPT

SEQ ID NO: 1778 - protein, 36 aa, Homo sapiens
DQQELHRYDLLEFLMGQQLTHHCLQTQSLASSHSLL

SEQ ID NO: 1779 - protein, 79 aa, Homo sapiens
NLVLLIFHGTKSSLRNWRVFVKEECWTVTHLTQIGKEFLRSLKMKLLKMEVLKPHTQNQYHPYLNHYLCLSLLFLFLHL

SEQ ID NO: 1780 - protein, 133 aa, Homo sapiens
RTWLPRGRSEPPHSHMEKEPEGKTDLKDLMEARHLILPQIVLFARVRQTPTLAVHPIPMYLWRRTGRQCAEKRSGRPRHSWKKQRQSPLHLRFGQMSATVRPMKMMFQCLAWPSHSKQKIFCMLRKNLTMTGG

SEQ ID NO: 1781 - protein, 121 aa, Homo sapiens
RSHMEKEPEGKTDLKDLMEARHLILPQIVLFARVRQTPTLAVHPIPMYLWRRTGRQCAEKRSGRPRHSWKKQRQSPLHLRFGQMSATVRPMKMMFQCLAWPSHSKQKIFCMLRKNLTMTGG

SEQ ID NO: 1782 - protein, 104 aa, Homo sapiens
CSAAGWCIAGEYGCPMVRQTPTLAVHPIPMYLWRRTGRQCAEKRSGRPRHSWKKQRQSPLHLRFGQMSATVRPMKMMFQCLAWPSHSKQKIFCMLRKNLTMTGG

SEQ ID NO: 1783 - protein, 98 aa, Homo sapiens
LLKLNTLFLGVRQTPTLAVHPIPMYLWRRTGRQCAEKRSGRPRHSWKKQRQSPLHLRFGQMSATVRPMKMMFQCLAWPSHSKQKIFCMLRKNLTMTGG

SEQ ID NO: 1784 - protein, 94 aa, Homo sapiens
RILISVVRQTPTLAVHPIPMYLWRRTGRQCAEKRSGRPRHSWKKQRQSPLHLRFGQMSATVRPMKMMFQCLAWPSHSKQKIFCMLRKNLTMTGG

SEQ ID NO: 1785 - protein, 131 aa, Homo sapiens
KVSSITVLMMMRTTVLTTHVLAASLTVVHDGQPWVSCPSFCLVYGVTFQPRVALNCARGVMTGLTGLVAAVKTQTQFAAKFPLSPLGTLKNQHSIINQEYYSNEDFFFLFLIHICNQLNSYNLGTVNRKVG

SEQ ID NO: 1786 - protein, 74 aa, Homo sapiens
LWVRLQNRLAPGQRRAGAPPAMEASPRVKLEAAIWSAGKRRTQPKQRRKNLFRMGLTTVLCPNSEVPSQRGSIN

SEQ ID NO: 1787 - protein, 104 aa, Homo sapiens
AQRQECKRSGPGVLVWRLARWASQPILWWKPLAPRWGHWASPSRGPHKPRSNVTTRGMAPAMCGTGPRSLGSTLCTSSVTMRTSETHPSLPTSCPPHLTASQIR

SEQ ID NO: 1788 - protein, 64 aa, Homo sapiens
GGSGRAVWDAGLPGGGPGGLPCPPLVQDLLPLDQGRPWQPTGVPELPGQGCSGTGPDPCPLGCA

SEQ ID NO: 1789 - protein, 20 aa, Homo sapiens
RRCTNPHECPPVSSPPCQSR

SEQ ID NO: 1790 - protein, 102 aa, Homo sapiens
CFQPCQPLLLLPHLYQLALQQMSLSIDFRDSFPAEYLLHLLKHSASFLYNSTETVLKTKTQINFPQSLLSQDPCPPVTYTGQSHLDLPQVIQVNREIPQKIA

SEQ ID NO: 1791 - protein, 135 aa, Homo sapiens
AGRRRRPFRPCHRNGAGCSSSIAFREHLAGTSLSPTRPSLSCCSPRRQTASCWCSRMPWPTPLPPLLLPASFLSTAPCRAPLASRGLGACPGKGGRGGAREDPPDLCPSIVLNPWRPQLSRQQWGTPADTPSTSC

SEQ ID NO: 1792 - protein, 41 aa, Homo sapiens
PLPPKQVLLGLHQGVPLPWTLQQLLCQGPTQLHLKDFHTHR

SEQ ID NO: 1793 - protein, 16 aa, Homo sapiens
KKLQCQHLGPPKYWWF

SEQ ID NO: 1794 - protein, 25 aa, Homo sapiens
RRKVLPNRRTLYLQLCQHQGETTVR

SEQ ID NO: 1795 - protein, 82 aa, Homo sapiens
IESTYPPLSSRHFRPQMAAPWCPLAQSPLPRALGLKAALGVGLSPLPRAYWSRGRAQATAVLPNRRTLYLQLCQHQGETTVR

SEQ ID NO: 1796 - protein, 58 aa, Homo sapiens
VSLRVLTLQPGGVTELALGRLLTRPHDVCVTCPLLLSSHLPIPTWRPPCQSAECQPHC

SEQ ID NO: 1797 - protein, 56 aa, Homo sapiens
SPSPSSASARTRRSALTTAASPSTATRSWVGARARRRRSTKMISCWCRAKWRRGTP

SEQ ID NO: 1798 - protein, 30 aa, Homo sapiens
KMYLSGIQCREPDKNLLPKVLWKIHLLQSD

SEQ ID NO: 1799 - protein, 136 aa, Homo sapiens
IVTGPKHQWAFQAPMGLSRLLRPLAPMVPQQPTGPNLLPPWQLLTALSHQPHWLLPMLPSSIPRLLPPTAASQAMPTMGQVSRLQPTCPCPRGPLPTPTAPRRPMSVPASPHPGPATTIPTKRLSPCRKGMVPTGV

SEQ ID NO: 1800 - protein, 130 aa, Homo sapiens
CWKPWRSPVPKIHLRPLSQRLSHQRNGGEQLRISTNSAVLFWHMLVTFPLAKRKVTGQPLAPALHCEERVRPTVMAGTRPPQIFEPSRLLLRKQSHPREGQLKQVPPSQDPQGPLSLVCRPPTVLPCLRR

SEQ ID NO: 1801 - protein, 126 aa, Homo sapiens
CPVIVGEIHLRPLSQRLSHQRNGGEQLRISTNSAVLFWHMLVTFPLAKRKVTGQPLAPALHCEERVRPTVMAGTRPPQIFEPSRLLLRKQSHPREGQLKQVPPSQDPQGPLSLVCRPPTVLPCLRR

SEQ ID NO: 1802 - protein, 32 aa, Homo sapiens
KISLRPRSTSPRPPSTSSPCRRKRIPVATGLR

SEQ ID NO: 1803 - protein, 67 aa, Homo sapiens
TITIMPSPPCRRKKTWRQVWAAAEFQSAHPSSTQMMRMTMRMTRRMTCRTPTLPLGIRGREQGSQGH

SEQ ID NO: 1804 - protein, 58 aa, Homo sapiens
KNGQGSTGKVPLPCLTRLPTGYLTPTCPQGRSPSALVEFSLLEHPPCSDQSIPRSHIW

SEQ ID NO: 1805 - protein, 57 aa, Homo sapiens
SRPTSCMPTSWCRLRAGALMAPSTRSLSLQEMMCPSLDPPSRTPLCSGRGLSSRNFC

SEQ ID NO: 1806 - protein, 49 aa, Homo sapiens
SRCRWRSSAGGSSPSPFQTSNCSLEISGMMRPWVTPWCSSGGSGATSTV

SEQ ID NO: 1807 - protein, 139 aa, Homo sapiens
WGSVRRAPRTPPFSARNSSCRIMRTSSPAWGCSSCWGLCSREQQKHPSCFSLFSTVLLSLQQRNKPRAQSPSIIMVSKIWPRFSSTCWWQSLFMPQFRNMCWIKLTRECSSPKRNKTSLTSLVSLVCSTFFLVFGAHSF

SEQ ID NO: 1808 - protein, 95 aa, Homo sapiens
LAPRRRKKPCWHSILQHQLPANIFGSVEWKTRPFISMQNPVRSRLYQAARYFLKEVDFDIVGKLPKRWWRPVPRSRGSLLRCTEPTLLRAAVPTP

SEQ ID NO: 1809 - protein, 29 aa, Homo sapiens
LFAENTDKLFEKLSGLPWCTKGYYVFRGS

SEQ ID NO: 1810 - protein, 77 aa, Homo sapiens
LRSRTQLKDCKLWGLKCKVVLDVATSCQKQMEEVKPRNSEANGLRGRVRKQHLAQRKGKRTKRRNKLCTLALTRLPT

SEQ ID NO: 1811 - protein, 37 aa, Homo sapiens
AENPLSLRMHPVSSPCTPLLPLRMVLRTNPSLDPKAL

SEQ ID NO: 1812 - protein, 98 aa, Homo sapiens
TLSPNPSAPLNTRLTRTPRVSPVMVYLLHPHLLLHLPCPPPQPRQSPGDPRRTCVVTASPRAENPLSLRMHPVSSPCTPLLPLRMVLRTNPSLDPKAL

SEQ ID NO: 1813 - protein, 28 aa, Homo sapiens
KSTASPLENYFHCVFRKILPKGPQQQNF

SEQ ID NO: 1814 - protein, 62 aa, Homo sapiens
HLRKTWNMRKRKQNLSWKSQNWRWSPSLRLSLSPRSRTFRIRTKRRNPSPSCVQPSLPWLST

SEQ ID NO: 1815 - protein, 45 aa, Homo sapiens
GKREGLFNSQPSKGSGTKGRGTGREGGPSCVQREQTAFSAQSSDR

SEQ ID NO: 1816 - protein, 54 aa, Homo sapiens
KNLTFGTPVNLSIYSPKTQLNRRKNLCQRLMRRKTRSKRSSNCWMENDLKLWES

SEQ ID NO: 1817 - protein, 52 aa, Homo sapiens
RICLFTARYDCTRISIPYNGSFGILFSLCLAEKCIPCCLQTKCYIFCIKLPT

SEQ ID NO: 1818 - protein, 97 aa, Homo sapiens
CVEILLVQMTYFFLSFSPKPVNLPIVEATTLFYLNYQSDCTRSGLNCLFFHTIPPLASERAGWFMGTLFFIQPNVRPLWLCYVPFFVKCRILSLFSL

SEQ ID NO: 1819 - protein, 322 aa, Homo sapiens
NHMNVRSVGKALIVVHTLFSIRKFIPMRNLLYVGNVRWPLDIIANLLNILEFILVTSHLNVKTVGRPSIVAQALFNIRVFTLVRSPMNVRSVGRLLDFTYNFPNIRKLTQVKNHLNVRNVGNSFVVVQILINIEVFILERNPLNVRNVGKPFDFICTLFDIRNCILVRNPLNVRSVGKPFDFICNLFDIRNCILVRNPLNVRNVERFLVFPPSLIAIRTFTQVRRHLECKECGKSFNRVSNHVQHQSIRAGVKPCECKGCGKGFICGSNVIQHQKIHSSEKLFVCKEWRTTFRYHYHLFNITKFTLVKNPLNVKNVERPSVF

SEQ ID NO: 1820 - protein, 180 aa, Homo sapiens
HSLLDIRTFILVRNHLNVKTVGRPSIVARTLFNIRVFTLVRSPMNVRSVGRLLDFTYNFLNMRKLIQVRNPLNVRNVGNSFVVVQILINIEVFIPERNPLNVRNVGKPFDFICTLFDIRNFILVRSPLNVRNVARPSVFTPSLITIRTFTQVRSHLNVKNVGSPLIVSQTLFNIRVFMLV

SEQ ID NO: 1821 - protein, 99 aa, Homo sapiens
ANGREREVSRRERILTTAFAGVRRKTTGLDRSPVAYFAANTIPEVAPVGWRPSSVLWSPRFNPCTCLCLNKPSKKRNGMRRKKVHPRLKDHFRKNLPKK

SEQ ID NO: 1822 - protein, 27 aa, Homo sapiens
NLFCAQETSSRKKRDHSEEGSGGPCAE

SEQ ID NO: 1823 - protein, 30 aa, Homo sapiens
IQKISKDYPNQNRSSTEDKNQKSEYCRPMC

SEQ ID NO: 1824 - protein, 103 aa, Homo sapiens
VLQRGAPLPDTPLPGLGPGGHAAHPQEGDLGSWLDPGVQPHGVLQPVRRAGHVQLGAPRPPGGQDPSHQRLGWGELPLVRQHHRDLHHRGPHQEGLQVHHQHE

SEQ ID NO: 1825 - protein, 81 aa, Homo sapiens
DPKDLLGLRDLQGNKDPEGIVVTKVKKVPLDLVAEMENLGPLEILAPLVLPAPLVPLVLVETLLPRWLEDLMKRLVAPSWE

SEQ ID NO: 1826 - protein, 61 aa, Homo sapiens
GAFKISFQMWVSNVFRISHKCKKNLRNQSVAMADWREMKSVIVVLRLNVDLQAVVIFELVY

SEQ ID NO: 1827 - protein, 42 aa, Homo sapiens
FIWIILVIWEQCFLEQCVLLVILQELHCNVDLQAVVIFELVY

SEQ ID NO: 1828 - protein, 36 aa, Homo sapiens [sequence omitted]

SEQ ID NO: 1829 - protein, 112 aa, Homo sapiens
LLSHHQQADLPLDERVSTELQAEEQLCHCRRELRGQEPARPSIQAGTHGIHERAAGGIGKGIPLQPLLVPAAPRGDGQPAESHGTPDQDLVPEPAHEVQEGPEGQGHPALAG

SEQ ID NO: 1830 - protein, 298 aa, Homo sapiens
GYEFFFDQLKLCRPQVPSMRGIFTERLPTQRPLARVLRRRPEAREQLPAGGGLRAARGVHRAALRGLPGPWAPAASATTPAAPATARSVPSGSCAATRRGPPPGARPALRGGQQQPPAASLRPEPPAPQPVPLRVQRARRLPLDAQSSREHGKPQLRRRGAQALSDRLHAPAGLGAGEGISLQPLPDTAPEGGDRPRALPLRAPDQDLVPEPAHEVEKRPQVAQHQDPLGWCGRLSRRAPWPAQWRPPRALVPPHAGATNLGVGVGSECRGWGGGTGGGPGAWAPEKSICPPPHFIYE

SEQ ID NO: 1831 - protein, 148 aa, Homo sapiens
YDRAGREKGPDRVYPLPDPGAGKGVPLQPLPDPATAHRDRPRTLPVRAPDQDLVPEPAHEVEEGQQIEKYEPGYSWQRLPALSPPRGAQRPKSPCHPQPWPLQSSPLCRRPLGTGSHKPASPCVTIFRLVLGLPVAPSLLDWLSCYYC

SEQ ID NO: 1832 - protein, 41 aa, Homo sapiens
AERDFQGRCHESLHQQSRRAKEKIRDMRDWIWLLCHVFILN

SEQ ID NO: 1833 - protein, 62 aa, Homo sapiens
KALTRSQVDAGSTFLVTSQAAEHWLNMDRDNGKIKKTVGVLKNSLVTLPVKPQTYRNLITGG

SEQ ID NO: 1834 - protein, 73 aa, Homo sapiens
SLRGYNFSPEIFTTFCNGSLGGHLLATAVSILCSTKYMDRDNGKIKKTVGVLKNSLVTLPVKPQTYRNLITGG

SEQ ID NO: 1835 - protein, 30 aa, Homo sapiens
SSTRFICENICDEYFYPKKGDQEKNKSMQT

SEQ ID NO: 1836 - protein, 64 aa, Homo sapiens
TPTIIMTRSWLIVVSGVGTKAQMSVPFNRFWAPKRNTSALVRTGIKSPSVDRKRLCYMNVALVI

SEQ ID NO: 1837 - protein, 48 aa, Homo sapiens
NSRTYYLTVGDSAFERLPRCKLSSSVALWGMFRGIGGDRSRSIRFLNN

SEQ ID NO: 1838 - protein, 26 aa, Homo sapiens
KWRRYHHYSTGYTRDSTRTYQSKTTV

SEQ ID NO: 1839 - protein, 21 aa, Homo sapiens
EKDPHLPRQQDSWHVAGARAL

SEQ ID NO: 1840 - protein, 63 aa, Homo sapiens
KVPPSSAQKTTFSSGIFNMTPWESQCGPAWAAGRGERLSWTMEYGQSRPRDTKPTSNIQVSYT

SEQ ID NO: 1841 - protein, 48 aa, Homo sapiens
ILSPNPIMKQKLSLISTKLKNLTTSSPGPFKFLDTLFQLSMLKCLHSP

SEQ ID NO: 1842 - protein, 17 aa, Homo sapiens
PPSKNDTYREADNFKIK

SEQ ID NO: 1843 - protein, 74 aa, Homo sapiens
KGKGWRGSDWNKNSWRERDKNGNGRNAWSGRNAWSGRNAWSGRNAWIGRGKKDKNERGWRDWNGRGKKGSDKSS

SEQ ID NO: 1844 - protein, 45 aa, Homo sapiens
FCCSCCFFGGERWSKSPYCPQRMTPGTTFITMMKKEAEKRTRTLT

SEQ ID NO: 1845 - protein, 61 aa, Homo sapiens [sequence omitted]

SEQ ID NO: 1846 - protein, 61 aa, Homo sapiens [sequence omitted]

SEQ ID NO: 1847 - protein, 63 aa, Homo sapiens
WKLNEGKNPRNAALLGSESDRATGHIYPGDDARTSMWSPRCPSFQGNARGARMEETLYHLQNQ

SEQ ID NO: 1848 - protein, 135 aa, Homo sapiens
EFILVKNPMNVKNVEKLLESVHSWLLIREFILERSLMNVLNVEMLSNRDHTLPNIRKLIQERNLMSVMNAGKPSAKLPILLNIKEFILERNPINVLNVERLLVIAHPVLSIKDSTLAKGPISVLNVGRRSEESYP

SEQ ID NO: 1849 - protein, 167 aa, Homo sapiens
LHIRESILGRSLMNAILVEKPSLRSHTSIYIRKFTLERDSMNATNVGKPSTRNQYSLFIRKFIQERNPMYALSVEELSSASQTLLLIKEFILERSLMNAVTVGSPLPPSLSSWCISQFTQERNPMCVPSAGRPLVAGQISVSTRKLIPEKSPTFVLNVGRPFDRSQS

SEQ ID NO: 1850 - protein, 13 aa, Homo sapiens
ENCEFNTKSYNTS

SEQ ID NO: 1851 - protein, 213 aa, Homo sapiens
DYSNKRTFTLQGSQTLKLSMGYPFRVEKLITSVESPQYRLATNTHLSFTRDFSLEKDLMYAVILGNSLAKVIVLIIIREFALEKDLISVDNVMNHFGIRPTSLNTREFTLEKDLMSVENVINLLVISTVLLTISEFTLEKDLMNVTNVGNLLAISAALFTTSEFTLEKDLISVENVGNRLITSATSFSISEFTLEKDLLSVRHVGSYLGATPT

SEQ ID NO: 1852 - protein, 212 aa, Homo sapiens
CRGRDGSTRRRGRGQPGAGDAHYQLQGIWGHSGLRLHFPHRGALGELSRTHDGRQVPADEVGYRDLPGSHQTVQRTDPGTPCPRRYNALSPPWDLGLGLPFGHDQRGSLGSQQQWHRRQHAARGGGSSGGWCSHCRPSLFACVTWGGPLAHGGWTPIPPTADFPIPQCGIQCPSPDWQARPGPPKEGQPAGLNVWVPRGPEGGRHPSMRSMW

SEQ ID NO: 1853 - protein, 153 aa, Homo sapiens
KMTGHPAHTQRHKDGRMVPSGPVSLLPTTTGKIWQWEPLLGGRSLAHTGSCLLRTDLLLSTEAPVSHWFSLPRGIVFLWDRAVVSVESKAQVARRPAQHLSPDAHLMVQTHPLHTHLTLRPAAGSWSMALCAPQATASLPTLQEGLAQKATFS

SEQ ID NO: 1854 - protein, 52 aa, Homo sapiens
PGQRVGEAWKQSGESARWSSREPGQGCSWQPRKGTTSEGWQSGEGTSSKGWE

SEQ ID NO: 1855 - protein, 17 aa, Homo sapiens
ELIQKKTEKEKRKEEIW

SEQ ID NO: 1856 - protein, 25 aa, Homo sapiens
KKREKSKRKRKGKGEKKNMKKKRIL

SEQ ID NO: 1857 - protein, 242 aa, Homo sapiens
INPMYALSVGRLSSRSLASSIIREFTLGRNLMDAVYVGKPSPESPGSLNTRETTQERNPMNALNVTKHSAGNHSSMHTRKFIQERSHIYAVIVEKASSRSLGSLIIREFIQERNHMDAACVGRPSPKGPGSLNTRELIQERNPMNALNVTKHSAGNHSSMHIRKLTQERSHIYAVIVEKASFRREISLYISEFILEKNPIYAMNVEKASSKRATSLFIDVLTLERNPMYAMNVGKASARRHV

SEQ ID NO: 1858 - protein, 47 aa, Homo sapiens
GPTQERNRMNVMSVENSSLGCHISLYIIELIQERNPMNVMNVEKPST

SEQ ID NO: 1859 - protein, 38 aa, Homo sapiens
RTLQSYGKRQKRQKRSNLNWTKWLRSWELTSSINPRSL

SEQ ID NO: 1860 - protein, 28 aa, Homo sapiens
MKNFEIQQTGPFWYEMRLLKCMVIILLH

SEQ ID NO: 1861 - protein, 31 aa, Homo sapiens
STYFFLYPPTRPTENKFPTRHKYPKKQTIGK

SEQ ID NO: 1862 - protein, 48 aa, Homo sapiens
TWSVSSWNWRKLSNSALLRNWSGNVRKFKGSENKKRSWFRKSWRSCSL

SEQ ID NO: 1863 - protein, 11 aa, Homo sapiens
ENSYWRETLQM

SEQ ID NO: 1864 - protein, 18 aa, Homo sapiens
GRARRYEPEPSVKTLQLA

SEQ ID NO: 1865 - protein, 43 aa, Homo sapiens
RVLMHSQTMCQTSPQMSVAPPAPILQPAPRPPEPKVHRAQVPI

SEQ ID NO: 1866 - protein, 43 aa, Homo sapiens
HGEDLAPHLLQRAACGSRGAPHPADRGPPEPQGQPREDDPDHV

SEQ ID NO: 1867 - protein, 31 aa, Homo sapiens
AACGSRGAPRAADRGPPEPQGQPREDDPDHV

SEQ ID NO: 1868 - protein, 18 aa, Homo sapiens
WPSWRPEPSSCYSRGPWP

SEQ ID NO: 1869 - protein, 26 aa, Homo sapiens
STLRDPHIPWVEPWPTILQGWQPAQR

SEQ ID NO: 1870 - protein, 14 aa, Homo sapiens
KNTGEQATRLPSFC

SEQ ID NO: 1871 - protein, 58 aa, Homo sapiens
GLEPILQGEQRWRLSCSEKHNCSGQNSVRPCTDPPCGRYGRTRDCRGERHPGLLAGSR

SEQ ID NO: 1872 - protein, 151 aa, Homo sapiens
NLKENEYLKILCMCLSMNVSIIIQRTRNILRNLKNIIGNVPALDRGQIQMMMIAIQRKKDSDQSLVLLQNILLVQSLREVIKSQKSIRRKVRRGDINLTLQNPMLSERRIKKKKIGKVKKTELDKDQNQNTNRLRKRLERILVIGILLAAN

SEQ ID NO: 1873 - protein, 56 aa, Homo sapiens
ISWLRMCAMTALLAPQASLVYQVLKGTKVSQESQGEKAQKGKRERLGLQAYQGPQE

SEQ ID NO: 1874 - protein, 113 aa, Homo sapiens
DRNLLRVGRVKSPLVMSPSLIFINNYSQERSLIHVMNVERVSVIAQLFVFIREFTWGRNSIIVMCVVRNSIRAHICKFIRESTLERNHSNVSSVGKALVVDQDFMFIVNYTQE

SEQ ID NO: 1875 - protein, 267 aa, Homo sapiens
ERHLLSMGSVKNSSVMSPSLIFINNYTQERYPIHVMSTGRDSVIAQLFVFIRKFTWERNAISVMCVVRHLVRTHNCKLIRESTLERNHSNVSSVGKVSAVDQECMFIANYTQEKNLIFVRNVGRPSFTIPSFGNIKESILGRSHSNVIYVVRASIVDQILIGIPWSTCKRNHLDVIPVVIALVRDQHLIVIAWTTQKRNYTNVKNVEGASLVGKIFVSIRWTIQETNHIIVMYVGRASGGPHVFQDISGSTMEKQHSSATDVGRDFI

SEQ ID NO: 1876 - protein, 114 aa, Homo sapiens
LNIRKFTLEKNSKNVENVAKPLSSAHTLLNLRTLTLERNLTSVKNVTTSLKLAQSLLKIEFMPEGNITDVKNLAKYLTSAPTLLNMSMVLRKNPANMKSAAVSLSLAQAFLINR

SEQ ID NO: 1877 - protein, 182 aa, Homo sapiens
RNHSNVWNVGKASVVDQHLLYIANYTQERNLTIVRNVEGPSYMLPIFRNIREFILGRNHSNVIHVVRTSVVDQHLIIIAWSTQERNHTNVRTVVSVSLVAQTFVSIKGSTQERNLTSVKNVVSALFSLHNFRPIGESTLERNHTYVKCVVRVSFTVQVFRPIRESTLERSHTNAMSVGRASE

SEQ ID NO: 1878 - protein, 34 aa, Homo sapiens
KTISRSRSPLMGSPSRCSQKIRESLSRCWPPSTL

SEQ ID NO: 1879 - protein, 52 aa, Homo sapiens
TPTRSRGSSGLTRKRRFFRSPGCMRLDMGGMWKKMHHSLETGQSIQESINQE

SEQ ID NO: 1880 - protein, 43 aa, Homo sapiens
KMAPGKSQSIFPSSTPLPGCVCLSWLHWPALLETHGLQKLAQF

SEQ ID NO: 1881 - protein, 107 aa, Homo sapiens
SVENPVEVLLQIARIQEAIVQEEVLQSQIDRSIQDLGHLIAETGFKNEIDMNTTESARERGEIRGRENGTEMLIKIGHATGIEIDCENENERENETKGETWIGKERD

SEQ ID NO: 1882 - protein, 32 aa, Homo sapiens
MVRKWNCLFSILRGSWKFIETKTVRQWSPRAW

SEQ ID NO: 1883 - protein, 47 aa, Homo sapiens
CFPQCAPDWTPSFLNTLQRMHTLSHRILFPRETLVIRVPACSSCQAL

SEQ ID NO: 1884 - protein, 96 aa, Homo sapiens
SQNQKKKDSIVKPRDFLIRRMISQDLGSTMLFTSHRCPTVSHCPRKELACFPQCAPDWTPSFLNTLQRMHTLSHRILFPRETLVIRVPACSSCQAL

SEQ ID NO: 1885 - protein, 80 aa, Homo sapiens
STERMISQDLGSTMLFTSHRCPTVSHCPRKELACFPQCAPDWTPSFLNTLQRMHTLSHRILFPRETLVIRVPACSSCQAL

SEQ ID NO: 1886 - protein, 27 aa, Homo sapiens
AKKRGPETTIFLLLPISIISAANFMSF

SEQ ID NO: 1887 - protein, 34 aa, Homo sapiens
EKKMKKEVIIKTTQIVNLHRQIILGGGGKDPLKP

SEQ ID NO: 1888 - protein, 52 aa, Homo sapiens
PPISVSKGHRPHHQRIPCQRPVGHRGLPTRSHVSCVPRLCPPEVQRENTGSG

SEQ ID NO: 1889 - protein, 103 aa, Homo sapiens [sequence omitted]

SEQ ID NO: 1890 - protein, 66 aa, Homo sapiens
GSSSSSSWSSCPSFASVAWLSASVATAESRSQTAQWIAGGPWNCPPSSPQRGSEYPFLRPHPPTVR

SEQ ID NO: 1891 - protein, 12 aa, Homo sapiens
PFFSHSNLGDDW

SEQ ID NO: 1892 - protein, 16 aa, Homo sapiens
NFWKSVFLDLANLVLN

SEQ ID NO: 1893 - protein, 41 aa, Homo sapiens
LRGRRLLKKLTEGSQASPVANPSINLRSFTHFLKMWWKKRT

SEQ ID NO: 1894 - protein, 66 aa, Homo sapiens
RKGPSPIPTCLASWLTSTRPLISIASTDTPSTIFIMNRHPNTLPGTCTGNRKTVLFLPTDTKKSSM

SEQ ID NO: 1895 - protein, 50 aa, Homo sapiens
CSLIIEKNTHLRKFSKRQISLKESLLEPYSPSPVVNQHSGFLQKNPNQRK

SEQ ID NO: 1896 - protein, 96 aa, Homo sapiens
KLNVILGVGFLILQPSPLFLGELQKAAEGMDIFRVTYCYLENRYNQSKRRRVGEAVLTSLFWIWKKMMKMIMRKLMILLMKLWMLFLTTRVRRLMM

SEQ ID NO: 1897 - protein, 171 aa, Homo sapiens
RCSVGRRWCCARAMHCCWCSLCSTSWTTSGTRSRCSSATPMGRWVPQRGQPEAAGGAQGRLRPGRPVLMPVWTSALLTALPLPPSGRLLQPRQGWRGLRPLQAMALGAPGASGTSGSWCTCSPRGALARRSSASYSTRIPRCSFSTSQCGMYGKNCIRGTPFPCRGQRGTC

SEQ ID NO: 1898 - protein, 34 aa, Homo sapiens
WVAFETRNSGRGKCSVSLCFLIFPNLWIGERKAT

SEQ ID NO: 1899 - protein, 26 aa, Homo sapiens
KKIGKLLYGKKAETMGFPVSSGVLQI

SEQ ID NO: 1900 - protein, 27 aa, Homo sapiens
DKRYWKKTFQMYRMWQSFQPVLNPCYT

SEQ ID NO: 1901 - protein, 18 aa, Homo sapiens
DKTYWKKTFQMYRMWQSF

SEQ ID NO: 1902 - protein, 38 aa, Homo sapiens
REGFVCQTETQVCQSPKIWRKSFQSMGSSSPEPEISQS

SEQ ID NO: 1903 - protein, 51 aa, Homo sapiens
LVYTVQPVHQVGKEQTNIQTHKLQKHIKSLFRKQPLKMILSFSYTFLSKDK

SEQ ID NO: 1904 - protein, 41 aa, Homo sapiens
GVWRHTAPSRLSTSTTAGLSHLPAPQPGSFTRASGPGPWWG

SEQ ID NO: 1905 - protein, 148 aa, Homo sapiens
VEPTASVLDLNIMDKCKSSQNRGAQWGLTPQDWHPASMPTPVRGPHIHSLSFPITPSPLLPNISSQAPIPSHPLIIFLQNPGLAWTLIPPPIPQGSSRLSLCVIMFNLNRSYCGRVGAGKMPPPRNLPTRVPSFWGVPRLAQAVLKLQ

SEQ ID NO: 1906 - protein, 23 aa, Homo sapiens
KLCLKPKNQPTGGGFVKMNLPTE

SEQ ID NO: 1907 - protein, 95 aa, Homo sapiens
PGHCAQGHQAGEPAAHHRWHPQNLRPGRGRGTAPVRGGRHLPDQPGLPGFPAARDCQRPGHLLRLQGGHLVGWGHPLQHHHGSVPLRRGQHLQVV

SEQ ID NO: 1908 - protein, 239 aa, Homo sapiens
RQAAAAATHRVRGVRRQVERQALRPVHVRGLQELLQAQRAEEPELHVPRQPELSHRPAPSQPVPVLPPQKVPQSGHETGSGAEGQDAADPADPRAVRADQRGSPQLPLVPVRIYFPAVARGALSHVALRQPMHAAQQHHGYREHLRTGREDALQRRRVGPEHPLLPRPADHGPGGPASPHLERAVCVECGAVLHAPPRRPAPGRRRPACFAHVRRPGGRLYGPHTDLPRASGEAQGAAR

SEQ ID NO: 1909 - protein, 166 aa, Homo sapiens
TRQIWFCGAEGQDAADPADPRAVRADQRGSPQLPLVPVRIYFPAVARGALSHVALRQPMHAAQQHHGYREHLRTGREDALQRRRVGPEHPLLPRPADHGPGGPASPHLERAVCVECGAVLHAPPRRPAPGRRRPACFAHVRRPGGRLYGPHTDLPRASGEAQGAAR

SEQ ID NO: 1910 - protein, 153 aa, Homo sapiens
AADPADPRAVRADQRGSPQLPLVPVRIYFPAVARGALSHVALRQPMHAAQQHHGYREHLRTGREDALQRRRVGPEHPLLPRPADHGPGGPASPHLERAVCVECGAVLHAPPRRPAPGRRRPACFAHVRRPGGRLYGPHTDLPRASGEAQGAAR

SEQ ID NO: 1911 - protein, 57 aa, Homo sapiens
AGRGRRAGLPGGGAGVPNCRDPGAGGQRSPRQQKDPHHPAPLAAGHPQRRGAQQAAW

SEQ ID NO: 1912 - protein, 100 aa, Homo sapiens
GRSPVPRGPSAPPAPQRQLCRAGRGRRAGVSGSGAGVPDRRDPGTGGQRGPRQQEDPHHPASSPTGHPQRRGAQQAAGQSHHRTGRCPAQHSGRATAQKD

SEQ ID NO: 1913 - protein, 73 aa, Homo sapiens
RQLRRAGWGRRAGVPGGGVRVPDRRDPGAGRQRGSRQQEDSHHPAPLAAGHPQRRGAQQTARPGDHCSGRRPS

SEQ ID NO: 1914 - protein, 18 aa, Homo sapiens
DCFCLFSGIISASSIWRL

SEQ ID NO: 1915 - protein, 34 aa, Homo sapiens
NSPTTFQTNMDLLWPSQVITLRGRGIIVLVLRLY

SEQ ID NO: 1916 - protein, 72 aa, Homo sapiens
WELLQSWRLPSFLSPVLQVLYLVDQKLRSVFSLMLIGKKTEPIKLVLNRVMVTKINGGIVLLPGRIFLVPLK

SEQ ID NO: 1917 - protein, 39 aa, Homo sapiens
KNILLRSLVEVLPLLENGRMGTWKKRWGIWPALLGECLH

SEQ ID NO: 1918 - protein, 34 aa, Homo sapiens
RSRSPFLSRWLAVFPAPISRLQSGLCISGTMSIS

SEQ ID NO: 1919 - protein, 49 aa, Homo sapiens
IKNNFPREKMTHWILNCLLNVQSAEERCIRSVSFTMRSSGLLDSSVMAV

SEQ ID NO: 1920 - protein, 82 aa, Homo sapiens
EPHNGFGACFATYPCQPTTPGGVQSQKARTSYQPAAIPTQGSDEGSVETSVRMAIPAACGCCQTGSTGLSQNYKTAYGHGYY

SEQ ID NO: 1921 - protein, 78 aa, Homo sapiens
GFGACFATYPCQPTTPGGVQSQKARTSYQPAAIPTQGSDEGSVETSVRMAIPAACGCCQTGSTGLSQNYKTAYGHGYY

SEQ ID NO: 1922 - protein, 209 aa, Homo sapiens
KKNQKKQVMKLRKEERPRPTRTKVRVHRSLRKAPVKMTRQKGKRKWTQELMTKMEMLLSILKNTLRSSSSLWRKKTRKPMKKVERMALLTKVSSPRRKKNGRTLIQRSRCQRLWRGRSMPPVGRLVWRTCRTHRPWSWLGPHLRRSRGKRNTEVELQMQTRQKAMNRISLPSWPPRSTPGKTHRVLRGNLGRLTMNVPWVITMSVCTRG

SEQ ID NO: 1923 - protein, 23 aa, Homo sapiens
LCQQAEHGLCPPGPRLSWREPNR

SEQ ID NO: 1924 - protein, 150 aa, Homo sapiens
GECGSLWRGPQESDHLWLGGWGLLCQPVDPVPLLRRSLPEGHHSERHRPVQLGSELPAGQVHSDIGRQGRLQHAGHHGHGRMPAEQELQGAHPADHHPGHLPHSLRAGDRRRRHPRRPPDPDGARRVPQLRHHAGRQPRGRPEVRGRHRG

SEQ ID NO: 1925 - protein, 150 aa, Homo sapiens
GECRSLWRGPQESDYLWLGGWGLLCQPVDPVPLLRRSLPEGHHSERHCPVQLGSELPAGQVHSDIGRQGRLQHAGHHGHGRMSEEQELQGAHPADHHPGHLPHSLWAGDRRRRHPRRPPDPDGARRVPQLRHHAGRQPRGRPEVRGRHRG

SEQ ID NO: 1926 - protein, 24 aa, Homo sapiens
MRPWNSRMPRLGRSQGGAGLTPAT

SEQ ID NO: 1927 - protein, 66 aa, Homo sapiens
PDNSRRRAVGLVPPHQVCLRALKMKNQQKSTKKTKRKKRKKRKKKRKPTGRYRQSNHPLRHPDARQ

SEQ ID NO: 1928 - protein, 27 aa, Homo sapiens
ECQWLFRCPCRTRPQPQGSCRSPDAGL

SEQ ID NO: 1929 - protein, 50 aa, Homo sapiens
RARGRLEGRVPSPVAPWPSAVSTSFRWRGSWGLGRGPQGSHLATCKRTAQ

SEQ ID NO: 1930 - protein, 67 aa, Homo sapiens
ISWEIKPPRKAMLFSISKSPWKQILILASPGISSEGAIQVLGKFRMPLYLTGSLLINQKQVQIHGVQ

SEQ ID NO: 1931 - protein, 113 aa, Homo sapiens
SPNTLTVISHPLLGAGLWEAQSWRLWLSFRFQSCICLIIFVRKNPSQNPCPWGASRNTSKVGRTQWNLTRIRMPLDSSGKLWSSTAILATVLESPRGLPGSLVPAHQSPLGSV

SEQ ID NO: 1932 - protein, 29 aa, Homo sapiens
RGPPKGGSHARTLCAPRGSPASCAEAASA

SEQ ID NO: 1933 - protein, 42 aa, Homo sapiens
NHYPKNSLSFTTYILSIIINCLNTRLVAKNGSQVCIQRGQTH

SEQ ID NO: 1934 - protein, 42 aa, Homo sapiens
FREQRGEYHLTKGENGITDIRTSLTGSSSNLSQESQIPSCRL

SEQ ID NO: 1935 - protein, 26 aa, Homo sapiens
RNIQRKKLYHPKKTLIGTCPKSLLCH

SEQ ID NO: 1936 - protein, 21 aa, Homo sapiens
LEVAPQKKTLIGTCPKSLLCH

SEQ ID NO: 1937 - protein, 37 aa, Homo sapiens
GQHGHSLGPFFIRWLRQEKEKGQPTQGVCADSSGLAV

SEQ ID NO: 1938 - protein, 34 aa, Homo sapiens
GHSLGPFFIRWLRQEKEKGQPTQGVCADSSGLAV

SEQ ID NO: 1939 - protein, 97 aa, Homo sapiens
TGGPSSPSSHWKTPVVIYWDGTALRCVFVPVLGETGAQRKRISARKGSLTTSCPQGALSEHCPTTPAPLPSQRRNHWMENISPFRSVGVSASRCSES

SEQ ID NO: 1940 - protein, 20 aa, Homo sapiens
TRRKLKILSVGVSASRCSES

SEQ ID NO: 1941 - protein, 35 aa, Homo sapiens
EMSIHRGVFLLTFPQDLDFSPHPHILKVEVSSPQV

SEQ ID NO: 1942 - protein, 61 aa, Homo sapiens
CVARSWETFCTWQIIRGHITSRNCTGVRHGGINCMIVQTVRTRISTLERNPIEAVLRKHCL

SEQ ID NO: 1943 - protein, 113 aa, Homo sapiens
CWRTGYLYPPWVVGVDQKMRRHLLRRAFLYKECLRSALLGQVCLPRRPTLVKCVARSWETFCTWQIIRGHITSRNCTGVRHGGINCMIVQTVRTRISTLERNPIEAVLRKHCL

SEQ ID NO: 1944 - protein, 175 aa, Homo sapiens
RWRTWHLCPPWVVGVEWKMRRHLLSRVFIYKERLRSGLLWQVCLPRRPTPVRCVARSWETFCMWQIIREHITSRNCTGVRPGGINCMTVETFISTRMSTLERNPTEGVLRRRCLRRGVSCMCQGSHLSSVRVGKTFCSGQDYSSKRPLTLGSQTAKLSVCLCFMGEKAITAVEDA

SEQ ID NO: 1945 - protein, 35 aa, Homo sapiens
ETRCTFLVDGSHIRGKILRLHLMIVNGDVPVHFLT

SEQ ID NO: 1946 - protein, 24 aa, Homo sapiens
HGAARGWLPDHLPLPAHVRVPSHV

SEQ ID NO: 1947 - protein, 112 aa, Homo sapiens
QEVSPPCTPEFTLEKSHMSVRIVRKFLARRTTSLHTREFTLEKGHMNAVIVGSHLPTALHSVFIREFTLVTPPYECSECGKSFAETFSLIKHRRVHTGVRSCDCSKCGKKVT

SEQ ID NO: 1948 - protein, 40 aa, Homo sapiens
DDKRDSNYNRKNYRIQNNSYNHTSNIYHNSRYHTIQNYYS

SEQ ID NO: 1949 - protein, 112 aa, Homo sapiens
TITCACPSYSCSCTYNSATSTGPTTSTGSTCSWCSPAACFHASSGNTASRLWSWCSSSPSSSTIFAPRIQPNAFTTRFSASWTPTSYNSTSIHSSSSHSTNKHPKLYYRWYK

SEQ ID NO: 1950 - protein, 36 aa, Homo sapiens
TAPGNRRTGGNPVCTSHPRPTRWRWSKVSRDLALPT

SEQ ID NO: 1951 - protein, 32 aa, Homo sapiens
NHIQRSPQTKRMLLNFQNGMISHQALHKRTSQ

SEQ ID NO: 1952 - protein, 28 aa, Homo sapiens
NPKMDCERTTEGWVFYHQTGSFRLRVNV

SEQ ID NO: 1953 - protein, 41 aa, Homo sapiens
PPPCRAKEQRPRPRSALSVQHPMCLLCLTSHRFRSSKRPST

SEQ ID NO: 1954 - protein, 39 aa, Homo sapiens
CRAKRQRPRPPRSALSVQHPMCLPCLTSHRFRSSKRPST

SEQ ID NO: 1955 - protein, 38 aa, Homo sapiens
CRAKEQRPRPRSALSVQHPMCLLCLTSHRFRSSKRPST

SEQ ID NO: 1956 - protein, 60 aa, Homo sapiens
YTKTPALLSCQCRPPAQFRDRIIVFGIQTNSLSVYSSSTLLHSLKQPYIIKDRHVQQSMV

SEQ ID NO: 1957 - protein, 45 aa, Homo sapiens
NLILYPLSLERQSLKTDRQLSVAELNHLINPFYHTLFHQSRNTLM

SEQ ID NO: 1958 - protein, 89 aa, Homo sapiens
DIRGFMVIKMFRILSTGSPGKVRVGRKASGKILRLPCLINVMSVREVSHGIEVLLNIRKSTLVRNPISVTHVEKVSLELHTLFNIREAM

SEQ ID NO: 1959 - protein, 88 aa, Homo sapiens
DIRGSILGIKMFRNLSRERPGKVGWKASWKMLKLPCLINVMSVKEVSLRIQASLNIKKSTLVRNPISVMRVEKASPEFHTLFNIREAM

SEQ ID NO: 1960 - protein, 105 aa, Homo sapiens
AFLDRPTCQCCKYVTGSSMPGGGFSQTCFGRMAKTLISLPFPAAGVRPQMWPSPVAAAPQCWLCLSQPPPMCSPCLCAPCRFTQARGKSQQPLSHVGSWSLPSPW

SEQ ID NO: 1961 - protein, 30 aa, Homo sapiens
FYPKRDLGHRNLPFEVCVLRHWELCHLHRS

SEQ ID NO: 1962 - protein, 23 aa, Homo sapiens
WVHTMTFLTYFFQIAGVCLKTKN

SEQ ID NO: 1963 - protein, 15 aa, Homo sapiens
RIIWIIDQWHCCFTR

SEQ ID NO: 1964 - protein, 56 aa, Homo sapiens
GKKEEEKMNHTIFQRSCQKRKFCLWLKKIKRRMRMKTPPLLISVWKIFRKIKIRIV

SEQ ID NO: 1965 - protein, 40 aa, Homo sapiens
REARKFCLWLKKIKRRMRMKTPPLLISVWKIFRKIKIRIV

SEQ ID NO: 1966 - protein, 43 aa, Homo sapiens
MQLRNLMIIIQIKLTGHLFLRKSIFLIFLPETYIGIMLIVCDG

SEQ ID NO: 1967 - protein, 39 aa, Homo sapiens
VPRHLIVVSRDTSKVSMVIMFLTPIDMMIIGQTILILAT

SEQ ID NO: 1968 - protein, 52 aa, Homo sapiens
LEHLCRITCMNCGPYSTFYCLMSLILQMTLILGLTLKIVLVIKNSWKDFMQF

SEQ ID NO: 1969 - protein, 107 aa, Homo sapiens
SWVCFSWRSTACPMARSPMTHSMLSSLSSPSPRLWTSSSLFRKTAMWWASWSSTPRRESHTCAQRTESSSATGMALFTTSSTWPWPAPSAEGRDTGILDSTGWVPSP

SEQ ID NO: 1970 - protein, 89 aa, Homo sapiens
DFCMKTQKKIFLILSDTLLRKNMSYSLLRRKLCAWMKKLITLQGKILHSEKKSAFLVEPSMIWLKKRNACKHVWIKNLRILHPLERVWQ

SEQ ID NO: 1971 - protein, 121 aa, Homo sapiens
KVRESQRMREVQKMKESQTRKKSRTWRGRQNARESERMRESQVMRDNWKMRETRKSRASLKVRTSHKVRASQPPRPSQRASRGPPKSARLKIMCPGKQKEKPTGGRTIPPRTLRRTYKKGI

SEQ ID NO: 1972 - protein, 20 aa, Homo sapiens
RATITKKIRLLKCDRTCWSS

SEQ ID NO: 1973 - protein, 37 aa, Homo sapiens
CRIRTGRCISRKSLPCTHPGTALLMPISTREESCRSL

SEQ ID NO: 1974 - protein, 73 aa, Homo sapiens
CRHFFGLACPTLTAGPASLVRARLLTLTVLCSSKSMSNQRTGRCISRKSLPCTHPGTALLMPISTREESCRSL

SEQ ID NO: 1975 - protein, 59 aa, Homo sapiens
LMGQGASSLEHQTCSLPSMRLRSVKLLEFAKEFWNILQWQRWWRLWKIWSLTQRILGQE

SEQ ID NO: 1976 - protein, 49 aa, Homo sapiens
KKKTNYTLEKIMPNMSSLKTQCIFFQSIWYLLQLKPMVKYPPHRFCRCF

SEQ ID NO: 1977 - protein, 49 aa, Homo sapiens
EECLGPGFILLKTPQKATNMFMELEEEQAALHTRTGHAIYVTDKCSSVE

SEQ ID NO: 1978 - protein, 28 aa, Homo sapiens
MSKQIFPQKKKIPILGRMKKFQIVLRLV

SEQ ID NO: 1979 - protein, 44 aa, Homo sapiens
NPYPIGFIMYSIFSLRVAVIGSTPYKKMRKKKRKKMKKKTILTT

SEQ ID NO: 1980 - protein, 62 aa, Homo sapiens
MTHLLSLMESLMRLKTSPSMPLQPSKLTAILRTILMKLRKLPKKPKILHMKLQNWQQVLGVY

SEQ ID NO: 1981 - protein, 60 aa, Homo sapiens
LLTSSFFLTMQSPIISQILLNIKPLANSGICTFEQEMSLFRKEKQMTKMMMKMGKTIRAQ

SEQ ID NO: 1982 - protein, 60 aa, Homo sapiens
RKPFRPHLNQPASMQLPLKSSRYSSRKMKVLIYKLLNFRNLILTFLVNNWKNITNSTRTQ

SEQ ID NO: 1983 - protein, 160 aa, Homo sapiens
LESAPEHLSYLAPTDTGGGFACPGCNHGVQRGGGGDWPAGAAWGPAQLHWASHSHPHCLPHWPFCLPSCWRPSWLPLGHLSLLHSPDHPLLPVPAQPHLPAACLPLGQGPHSPPHPDLQNVSYHAGHHDRVAALLCPDLDRRAAHRPKSLWLPGTNRCPW

SEQ ID NO: 1984 - protein, 156 aa, Homo sapiens
LESAPEHLSYLAPTDTGGPGCNHGVQRGGGGDWPAGAAWGPAQLHWASHSHPHCLPHWPFCLPSCWRPSWLPLGHLSLLHSPDHPLLPVPAQPHLPAACLPLGQGPHSPPHPDLQNVSYHAGHHDRVAALLCPDLDRRAAHRPKSLWLPGTNRCPW

SEQ ID NO: 1985 - protein, 33 aa, Homo sapiens
MWQMTTITLPFFLTPLTLPTFPKTTPGVPPSSQ

SEQ ID NO: 1986 - protein, 33 aa, Homo sapiens
MWQTPTTTRPPSPIHPTQSMSLKTTPGVPPSSL

SEQ ID NO: 1987 - protein, 81 aa, Homo sapiens
AMRARGCCPPFPFHLAPSPPRAPVPTPRRKMRLSPVQCLGLPHPRSSAHCSSAPSWPLYAPPRAPALCWRKTVRVKAEPRT

SEQ ID NO: 1988 - protein, 21 aa, Homo sapiens
CLKLFQCSVAELAILSLWSAS

SEQ ID NO: 1989 - protein, 12 aa, Homo sapiens
RSLCETAGSEKG

1. (canceled)

2. A method of identifying at least one neoantigen for preparing a subject-specific immunogenic composition the method comprising:
a. performing complete, targeted or partial genome, exome, or transcriptome sequencing of at least one tumor sample obtained from a subject having cancer to obtain a set of sequences of the subject-specific tumor genome, exome or transcriptome;
b. comparing at least one sequence or portion thereof from the set of sequences with a database of nucleotide and/or polypeptide sequences, wherein the sequences in the database are represented by at least SEQ ID.NO 1-147;
c. identifying a match between the at least one sequence or portion thereof from the set of sequences and a sequence in the database when they have a string in common representative of at least 8, preferably at least 10 amino acids to thereby identify a tumor-specific neoantigen encoded by a tumor-specific frameshift mutation in genes of the subject having cancer; and optionally
d. repeating steps b.-c. for a further sequence or portion thereof, from the set of sequences of the subject-specific tumor genome, exome or transcriptome.

3. The method of claim 2, wherein the sequences in the database are identified by at least SEQ ID.NO 1-960, or SEQ ID.NO 1-1989.

4. The method of claim 2, wherein a plurality of neoantigens for preparing a subject-specific immunogenic composition are identified.

5. The method of claim 2, wherein the neoantigen is about 8-10 amino acids in length, greater than 10 amino acids in length, greater than 15 amino acids in length, greater than 30 amino acids in length, or greater than 50 amino acids in length.

6. The method of claim 2, wherein the method further comprises comparing at least one sequence or portion thereof from the set of sequences of the subject-specific tumor genome, exome or transcriptome with sequences obtained by complete, targeted or partial genome, exome, or transcriptome sequencing of a normal tissue sample obtained from the subject having cancer.

7. A method of treating cancer in a subject comprising administering
(A) a subject-specific immunogenic composition prepared based on a neoantigen identified with the method of claim 2.

8. The method of treating cancer of claim 7, further comprising administering to the subject
(B) an anti-CTLA agent, an anti-PD-1 agent, an anti-PD-L1 agent or a combination thereof, wherein (A) and (B) are administered simultaneously or sequentially.

9. The method of treating cancer of claim 7, further comprising one or more immune-stimulating adjuvant(s), including but not limited to liposomes, Montanide ISA51, Hiltonol, CAF09, Amplivant, Resiquimod, Iscomatrix, CpG, poly-ICLC, aluminium salts, monophosphoryl lipid A and/or squalene.

10. The method of treating cancer of claim 7, wherein the plurality of neoantigens comprises at least 4, 8 or 12 neoantigens.

11. A computerized system for identifying a match in the method of claim 2, the system comprising:
a first database configured to store information regarding at least one sequence in a set of sequences obtained from a subject-specific tumor genome, exome or transcriptome obtained by complete, targeted or partial genome, exome, or transcriptome sequencing;
a second database configured to store information regarding at least 147 sequences selected from SEQ. ID. No. 1-1989, preferably at least SEQ ID.NO 1-147;
a processor configured to perform instructions for identifying a match by comparing at least one sequence in the set of sequences from a subject-specific tumor genome, exome or transcriptome in the first database with the sequences in the second database,
wherein a match is identified when they have a string in common representative of at least 8, preferably at least amino acids, to thereby identify a tumor-specific neoantigen encoded by a tumor-specific frameshift mutation in genes of the subject having cancer.

12. (canceled)

13. A method of identifying at least one neoantigen for preparing a subject-specific immunogenic composition the method comprising:
a. performing complete, targeted or partial genome, exome, or transcriptome sequencing of at least one tumor sample obtained from a subject having cancer to obtain a set of sequences of the subject-specific tumor genome, exome or transcriptome;
b. determining the presence or absence of a match between the set of sequences from the tumor sample and each of SEQ ID.NO 1-147; wherein a match between sequences is present when sequences have in common a string of at least 8, preferably at least 10 amino acids, and whereby the presence of a match identifies a tumor-specific neoantigen encoded by a tumor-specific frameshift mutation in genes of the subject having cancer.
